(19) United States
(12) Patent Application Publication
(10) Pub. No.: US 2011/0151490 A1
(43) Pub. Date: Jun. 23, 2011

(54) Compositions for the Detection and Treatment of Colorectal Cancer

(75) Inventors: Jeffrey D. Hillman, Gainesville, FL (US); Manohar John, Newberry, FL (US)

(73) Assignee: Oragenics, Inc., Alachua, FL (US)

(21) Appl. No.: 13/054,667

(22) PCT Filed: Jul. 17, 2009
(86) PCT No.: PCT/US09/50938

§ 371 Date: Mar. 2, 2011

Related U.S. Application Data
(60) Provisional application No. 61/081,926, filed on Jul. 18, 2008.

(51) Int. Cl. G01N 33/53; C07K 16/18; C07K 16/22; C07K 16/26

(52) U.S. Cl. 435/7.92; 530/389.2; 530/389.1; 530/389.3; 530/388.1

(57) ABSTRACT

The invention provides methods of identifying proteins and polypeptides and their cognate polynucleotides that are expressed by cells under one environmental condition and not under a second environmental condition. The invention also provides compositions for the treatment and detection of cancer, including colorectal cancer.

### PRIORITY

[0001] This application claims the benefit of U.S. Ser. No. 61/081,926, filed Jul. 18, 2008, which is incorporated herein by reference in its entirety.

### GOVERNMENT INTEREST

[0002] This invention was supported, in part, by NIH/NCI/SBIR grant number 1R43CA124006-01A1. The government of the United States has certain rights to the invention.

### BACKGROUND OF THE INVENTION

[0003] The identification of proteins, polypeptide and other cellular constituent that are made when a cell undergoes a change from one state or condition to another can be important because such molecules are very likely to serve as indicators that the change is or has taken place. In the case where one condition is health and the second condition is a disease state, identification of such “change mediated” proteins, polypeptides or other cellular components should provide excellent targets for the development of new diagnostics, and likewise may provide targets for various types of antibiotherapies (e.g., vaccines) to aid in the treatment of the disease.

[0004] In certain instances, change mediated molecules may be shed from the diseased tissue and enter into bodily fluids that are relatively easily recovered. The identification of the presence of cellular constituents shed from diseased (e.g., cancerous) tissue in bodily fluids can be important because such shed proteins are very likely candidates to serve as ideal diagnostic targets that are pathogenomonic of active disease. For example, polypeptides that are differentially expressed in cancerous cells, such as colorectal cancer cells, and polypeptides that specifically expressed in cancerous cells and that are shed from cancerous cells into bodily fluids can be used to provide a precise and accurate diagnosis of cancer, for screening of anti-cancer compounds, for the development of therapeutic compositions, and other uses.

### SUMMARY OF THE INVENTION

[0005] One embodiment of the invention provides a method of detecting cancer or a predisposition to developing cancer in a subject. The method comprises determining an expression level of a cancer-associated polynucleotide, protein, or polypeptide selected from the group consisting of Titin; HBA1; Insulin-like growth factor 1 receptor (IGF1R); Isoform 3 of zonadhesin precursor; latent transforming growth factor beta binding protein 4 (LTBP4); ASXL1 (additional sex combs like 1); beta globin (HBB); BMP15-bone morphogenetic protein; TRIM49; DNAJ homolog subfamily B member 11 precursor; uncharacterized hematopoietic stem/progenitor cells protein MDS027; uncharacterized protein ALB; isoform 3 of sushi, nidogen and EGF-like domain-containing protein 1 precursor; isoform 2 of peripherin; mitochondrial 28S ribosomal protein S22; translation initiation factor EIF-2B subunit epsilon; estradiol 17-beta-dehydrogenase 1; XRCC6BP1; brain-specific angiogenesis inhibitor 1 precursor; isoform 2 of ring finger and CCCH-type zinc finger domain-containing protein 2; hemoglobin subunit beta; isoform 1 of far upstream element-binding protein 1; GALECTIN-3; lysozyme C precursor; actin, alpha skeletal muscle; isoform M2 of pyruvate kinase isozymes M1/M2; AGR2; neutrophil defensin 1 precursor; myeloblastin precursor; uncharacterized protein PSME2; tubulin beta-2C chain; thiosulfate sulfurtransferase; heat shock 70 kDa protein 1; Ig kappa chain V-III region sie; macrophage migration inhibitory factor; isoform 1 of ATP synthase subunit D, mitochondrial; uncharacterized protein ENSP00000374051; isocitrate dehydrogenase [NADP] cytoplasmic; hemoglobin subunit delta; isoform 1 of splicing factor, arginine/serine-rich 7; isoform 1 of mRNA-capping enzyme; LON protease homolog, mitochondrial precursor; signal recognition particle 54 kDa protein; isoform long of galectin-9; integrin-linked protein kinase; bifunctional aminoacyl-tRNA synthetase; isoform 1 of zinc finger protein 207; inorganic pyrophosphatase; calponin-2; isoform 1 of muscleblind-like protein 3; cathepsin G precursor; zinc finger and BTB domain-containing protein 34; adenine phosphoribosyltransferase; 40S ribosomal protein S9; TALIN-1; leucine-rich repeat-containing protein 59; ATP synthase subunit alpha, mitochondrial precursor; isoform 7 of protein transport protein SEC31A; dihydroxyacetone kinase; protein similar to heterogeneous nuclear ribonucleoproteins C1/C2 (HNRNP C1/HNRNP C2) isoform 4; 18 kDa protein (e.g., UNIPARC Accession Number IP100796554; cold agglutinin FS-1 L-chain; isoform 1 of heterogeneous nuclear ribonucleoprotein d0; DAZAP1/MEF2D fusion protein; POTE2; Keratin 18 (KRT18); PSME4 Isoform 1 of Proteasome activator complex subunit; Mitogen-activated protein kinase-activated protein kinase (MAPKAPK33); Complement component 1, s subcomponent (C1S); Lysozyme C precursor (LYZ); Keritin Type Cytoskeletal 20 (KRT20); RNASE3; Aldehyde dehydrogenase X, mitochondrial precursor (ALDH1B1); CDNA FLJ25506 fis, clone CBR05185; Isoform B of fibulin-1 precursor (FBLN1); Nucleobindin 1 (NUCB1); Histone cluster 2, H2ba (HIST2H2BA); Tripartite motif-containing 28 (TRIM28); Peroxisomal D3, D2 enoyl-CoA isomerase (PECI); Peptidylprolyl isomerase B (PPIB); Similar to 40S ribosomal protein S17; Eukaryotic translation elongation factor 1 gamma (EEF1G); Keratin 8 (KRT8); Fibulin 2 (FBLN2); VIM; Fibrinogen alpha chain (FGA); Annexin A2 (ANXA2); H2A histone family, member J (H2AFJ); Actin alpha, cardiac muscle 1 (ACTC1); Keratin 19 (KRT19); Immunoglobin lambda locus (IGL@protein); Immunoglobulin heavy constant mu (IGHM); EGF-containing fibulin-like extracellular matrix protein 1 (EFEMP1); Tripartite motif-containing protein 34; Isoform 3 of AP1-subunit Gamma Binding Protein 1; Proflin-1; Histone H4; Hemoglobin subunit alpha; Transgelin); Lumican precursor; Hemoglobin Beta; Fibrinogen Beta Chain Precursor; Immunoglobulin kappa constant (IGKC); Uncharacterized Protein ALB; ApoA1; C4A; C3 187 kDa protein; Actin, Cytoplasmic 1 (actin beta); Hemoglobin beta; Hemoglobin subunit alpha; POTE-2 alpha actin; SLC4A10; Ribonuclease P Protein Subunit P20 (POP7); Nuclear RNA export factor 1 (NXF1); UVEAL Autoantigen With Coiled-Coil Domains And Ankyrin Repeats, UACA; Uncharacterized Protein C13ORF27; Isoform 3 of Sushi, Nidogen And EGF-Like Domain-Containing Protein 1 Precursor; Isoform 1 Of Dynein Heavy Chain 10, Axonemal (DNAH10); Gap junction alpha-1 protein (GJA1/Connexion 43); Isoform 1 Of Kinesin-Like Protein KIF25 (KIF25); GAPDH-Glyceraldehyde-3-Phosphate Dehydrogenase; Uncharacterized Protein ALB; Galectin-3, LGALS3; Similar to NAC-Alpha Domain-Containing Protein 1 (NACAD); Acetyl-CoA Acetyltransferase, Mitochondrial, ACAT1; KH-Type Splicing Regulatory Protein, FUBP2; Profilin 1 (PFN1); Chloride Intracellular Channel Protein 1, CLIC1; Zinc Finger Protein 831; Endoplasmin; Ribosomal Protein S10 (RPS10); Splicing Factor, Arginine/Serine-Rich 3; ACTA2 Protein (alpha actin, smooth muscle); Isoform 1 of Sodium Channel Protein Type 8 Subunit Alpha, SCN8A; Isoform Long of Galectin-9; T-Complcx Protein 1 Subunit Epsilon, CCT5; Alpha-Enolase, Lung Specific; Proto-Oncogene Serine/Threonine-Protein Kinase MOS; Isoform 1 Of Beta-Adducin (ADD2); Apolipoprotein E (APOE); Ubiquilin-4 (UBQLN4) (ataxin-1 ubiquitin-like interacting protein); Sumo-Conjugating Enzyme UB21 (UBC9 homolog in yeast); Myosin-15 (MYH15); FLJ93091, Homo Sapiens UMP-CMP Kinase (UMP-CMPK); Intelectin-1 (ITLN1); Apolipoprotein A-IV (APOA4); Mitochondrial pyruvate dehydrogenase (lipoamide) alpha 1 (PDHA1); Leucine-Rich Repeat-Containing Protein 59 (LRRC59); 60S Ribosomal Protein L37A (RPL37A); Uridine-Cytidine Kinase 1-like 1 (UCKL1); Aldehyde Dehydrogenase 9A1 (ALDH9A1); Isoform 3 of Thioredoxin Reductase 1, Cytoplasmic (TXNRD1); Nuclear Receptor Subfamily 2 Group E Member 1 (NR2E1); Cation Channel Sperm-Associated Protein 3 (CATSPER3); Transmembrane EMP24 Domain-Containing Protein 1 (TMED1); Protein FAM154A (FAM154A); Sand Isoform 1 of Transcriptional Repressor NF-X1 (NFX1); or any combinations thereof (“the polypeptides of the invention”) in a biological sample from the subject. An increase of the expression level of the cancer-associated polynucleotide in the biological sample, such as a bodily fluid, as compared to a control sample indicates that the subject has cancer or has a predisposition to developing cancer. The protein or polypeptide can comprise an amino acid sequence set forth as SEQ ID NO:1-157. The cancer can be colorectal cancer. The method can further comprise determining the expression level of one or more or two or more of the cancer-associated proteins or polypeptides. The expression level of the cancer-associated proteins or polypeptides can be determined by a method selected from group consisting of: (a) detecting the presence of the protein or polypeptide (b) detecting the biological activity of the protein or polypeptide encoded by the cancer-associated polynucleotide, and (c) detecting mRNA of the cancer-associated polynucleotide. The biological sample can comprise cells, cell extracts, tissue, bodily fluid, and bodily fluid substantially lacking cells (e.g., less than about 1, 5, or 10% cells) such as serum, urine, tears, milk, seminal fluid, prostatic fluid, lung lavage fluid, and saliva. The level of the cancer-associated protein or polypeptide can be determined by detecting its level in the biological sample using an antibody that binds to epitopes of the protein or polypeptide specific to the change mediated protein or polypeptide or by other means known in the art.

[0006] Another embodiment of the invention provides an isolated antibody or antigen-binding fragment thereof that specifically binds to a protein or polypeptide of the invention or any combinations thereof. A protein or polypeptide of the invention can comprise an amino acid sequence set forth as SEQ ID NO:1-157. The antibody can be a monoclonal antibody, a polyclonal antibody, a single-chain antibody, a monospecific single-chain antibody, a bispecific single-chain antibody, a bivalent single-chain antibody, a tetravalent single-chain antibody, a chimeric antibody, an antigen-binding fragment of an antibody, or a humanized antibody.

[0007] Even another embodiment of the invention provides a method of screening for anti-cancer compounds. The method comprises comparing the level of a change mediated protein or polypeptide expression product in a first biological sample in the presence of a test compound to the level of the change mediated protein or polypeptide expression product in a second biological sample in the absence of the test compound. The change mediated expression product comprises a protein or polypeptide of the invention or mRNA encoding the polypeptide of the invention or any combinations thereof. A test compound that decreases the level of the expression product in the first biological sample as compared to the second biological sample is identified as an anti-cancer agent. The protein or polypeptide can comprise an amino acid sequence set forth as SEQ ID NO:1-157.

[0008] Yet another embodiment of the invention provides a method of screening for a compound for treating or preventing cancer. The method comprises (a) contacting a candidate compound with a cell expressing a protein or polypeptide of the invention or any combinations thereof and (b) selecting a compound that reduces the expression level of the protein or polypeptide. The protein or polypeptide can comprise an amino acid sequence set forth as SEQ ID NO:1-157.

[0009] Another embodiment of the invention provides a kit for the detection of cancer in a mammal. The kit comprises (a) an antibody or antigen-binding fragment thereof, wherein in the antibody or antigen-binding fragment thereof specifically binds an epitope of the protein or polypeptide of the invention and (b) one or more reagents for detecting a binding reaction between the antibody and the protein or polypeptide. The protein or polypeptide can comprise an amino acid sequence set forth as SEQ ID NO:1-157 or any combinations thereof.

[0010] Still another embodiment of the invention provides a kit for detecting cancer cells in a biological sample comprising at least one polynucleotide primer or probe wherein the polynucleotide primer or probe is specific for a polynucleotide that encodes a protein or polypeptide of the invention. The protein or polypeptide can comprise an amino acid sequence set forth as SEQ ID NO:1-157 or any combinations thereof. The kit can comprise at least two polynucleotide primers specific for the polynucleotide that encodes a protein or polypeptide of the invention.

[0011] Yet another embodiment of the invention provides a fusion protein comprising at least two proteins or polypeptides of the invention or any combinations thereof. At least two proteins or polypeptides can he selected from the group consisting of an amino acid sequence set forth as SEQ ID NO:1-157.

[0012] Even another embodiment of the invention provides a composition comprising a first component selected from the group consisting of physiologically acceptable carriers and immunostimulants, and a second component selected from the group consisting of a protein or polypeptide of the invention or any combinations thereof; a polynucleotide that encodes the protein or polypeptide of the invention or any combinations thereof; an antibody according of the invention or any combinations thereof; and a fusion protein of the invention or any combinations thereof. The protein or polypeptide can comprise an amino acid sequence set forth as SEQ ID NO:1-157 or any combinations thereof.

[0013] Another embodiment of the invention provides a colorectal cancer reference expression profile, comprising a pattern of protein or polypeptide expression of two or more proteins or polypeptides of the invention set forth as SEQ ID NO:1-157 or any combinations thereof.

[0014] Another embodiment of the invention provides a colorectal cancer reference expression profile, comprising a pattern of polynucleotide expression of two or more polynucleotides that encode proteins or polypeptides of the invention or any combinations thereof. The polypeptides of the invention can comprise amino acid sequences set forth as SEQ ID NO:1-157.

[0015] Yet another embodiment of the invention provides an array comprising two or more polynucleotides that specifically hybridize to two or more polynucleotides that encode a protein or polypeptide of the invention or two or more polypeptides of the invention or any combinations thereof. The polypeptides of the invention can comprise amino acid sequences set forth as SEQ ID NO:1-157.

[0016] Still another embodiment of the invention provides a composition for treating cancer. The composition comprises a pharmaceutically effective amount of an antibody or antigen-binding fragment thereof that specifically binds to a protein or polypeptide of the invention or any combinations thereof. The protein or polypeptide of invention can comprise an amino acid sequence set forth as SEQ ID NO:1-157.

[0017] Even another embodiment of the invention provides a composition for treating cancer. The composition comprises a pharmaceutically effective amount of a polypeptide of the invention or a polynucleotide encoding the polypeptide of the invention. The polypeptide of the invention can comprise an amino acid sequence set forth as SEQ ID NO:1-157.

[0018] Another embodiment of the invention provides a method for treating cancer in a subject or stimulating an immune response, such as an anti-tumor immune response or any other type of immune response in a subject. The method comprises (a) administering to the subject a pharmaceutically effective amount of a protein or polypeptide of the invention (b) administering to the subject a pharmaceutically effective amount of a polynucleotide, or fragment thereof, that encodes the polypeptide of the invention; or (c) administering to the subject a pharmaceutically effective amount of an antibody or antigen-binding fragment thereof that specifically binds to the protein or polypeptide of the invention. The protein or polypeptide of the invention can comprise an amino acid sequence set forth as SEQ ID NO:1-157. The cancer can be colorectal cancer.

[0019] Still another embodiment of the invention provides a method of isolating a change mediated protein or polypeptide, and its cognate gene or polynucleotide, expressed by a first host under a first environmental condition and not under a second environmental condition. The method comprises the steps of:
[0020] (a) obtaining a cell, tissue or fluid sample from the first host under the first environmental condition and optionally storing it under conditions (e.g., frozen) to preserve proteins, polypeptides, and other components of potential interest (i.e., change mediated) in the sample;
[0021] (b) immunizing an animal, optionally one that is phylogenetically distant from the first host and optionally using strong adjuvants, with the sample from (a) to elicit a strong, broad antibody response, resulting in an immunized animal;
[0022] (c) collecting antibodies from the immunized animal and optionally purifying the antibodies;
[0023] (d) adsorbing the antibodies with tissue, homogenized tissue, cells, cell extracts or fluid samples from a second host (optionally of the same species or same individual host as used in (a)) under the second environmental condition;
[0024] (e) isolating unadsorbed antibodies; and
[0025] (f) using the unadsorbed antibodies to isolate proteins, polypeptides or other constituents (e.g., lipids, carbohydrates, or glycoproteins) present in the cell, tissue or fluid sample of the first host under the first environmental condition and not present in the cell, tissue or fluid of the host under the second environmental condition; and optionally
[0026] (g) identifying the isolated protein, polypeptide or other component.
   The first environmental condition can be a disease, a cancer, or an autoimmune disease. The second environmental condition can be normal condition, healthy condition, non-diseased condition or an environmental condition that is different from the first environmental condition. Cells and tissue can be from any part of the host. In the case where the host is an animal, the bodily fluid can be urine, tears, plasma, milk, lavage fluid, prostatic fluid, seminal fluid, saliva, scrum, sputum, and pleural effusion. The bodily fluid from a plant can be extracted from phloem or xylum. The bodily fluid can substantially lack cells. Where the first host is an animal, the immunized animal can be the same species as the first host animal or a different type of animal than the first host animal. The method can further comprise isolating proteins, peptides or other components of interest directly from homogenates or extracts of cells or tissues taken from the host under the first condition. Proteins or peptide can alternatively be captured using the unadsorbed antibodies from a library constructed using DNA or mRNA obtained from the host under the first environmental condition, wherein the library is an expression library or display library. “Probing a library” can comprise:
[0027] (a) immobilizing the unadsorbed antibodies on a solid support;
[0028] (b) adding cell or tissue homogenates or fluids of the first host under the first condition or expressed proteins of the genomic expression library or surface display library made from the DNA or RNA of the host under the first environmental condition;
[0029] (c) washing unbound proteins or members of the phage library from the solid support;
[0030] (d) recovering proteins and polypeptides or members of the surface display library that are bound to the solid support; and
[0031] (e) identifying the specifically captured proteins and polypeptides, or, in the case of surface display library probing, the gene or polynucleotide responsible for expressing the cognate protein or polypeptide that was captured by the antibody(ies).
   The solid support can be blocked with a blocking agent before the homogenate, fluid, or library is added to decrease non-specific binding. The solid support can be selected from the group consisting of nitrocellulose, nylon, polystyrene, polyvinylchloride, latex, fiberglass, glass, microsphere, liposome, sepharose, sephadex, and a magnetic particle. The antibodies can be derived from an immunized animal selected from the group consisting of humans, baboons, chimpanzees, macaques, cattle, sheep, pigs, horses, goats, dogs, cats, rabbits, guinea pigs, rats, mice, chickens, ducks, and fish. The cells, tissues, and bodily fluid samples can be frozen immediately after it is obtained from the host under the first environmental condition. The cells, tissues, and fluid samples from the second host under the second environmental condition can be frozen immediately after they are obtained to minimize degradation of molecules needed to adsorb and remove non-change mediated components. Identification of the captured proteins, polypeptides or other components (e.g., lipids, carbohydrates, or glycoproteins) can be performed using conventional methods known in the art such as mass spectroscopy in association with separation methods (e.g., GeLC-MS/MS).

[0032] Also provided is a method of confirming and validating the specifically expressed nature of the isolated protein/polypeptide as expressed by the host in response to the disease or change mediated condition. The method comprises:
[0033] (a) purifying the natural or recombinant protein or polypeptide;
[0034] (b) producing non-cross reactive (e.g., monoclonal) antibodies to the polypeptide;
[0035] (c) probing cells, cell extracts, bodily fluids, or tissue of the host under the first and second environmental conditions with the antibodies of (b); and
[0036] (d) demonstrating relative reactivity of the antibody(ies) with samples from the first but not the second environmental condition.
   whereby the identified protein or polypeptide and its cognate polynucleotide is confirmed as being a change mediated molecule expressed under the first environmental condition but not the second if the antibodies specifically bind with the cells, cell extracts, bodily fluids, or tissue obtained from the host under the first condition but not the second.

### BRIEF DESCRIPTION OF THE DRAWING

[0037] FIG. 1 shows an assessment of reactivity of polyclonal egg antibodies (YPAbs) raised in chickens using homogenates of stage IV human colon cancer tissue with pooled sera of patients diagnosed with stage IV colon cancer by dot immunoblot assay. Differential reactivity of spotted pooled sera from stage IV colon cancer patients was compared with spots of control serum from age, gender and ethnicity-matched healthy patients (spot 4), BSA (spot 3), and homogenates of healthy tissue (spot 1). A homogenate of stage IV cancer tissue was the positive control (spot 2).

### DETAILED DESCRIPTION OF THE INVENTION

[0038] As used in this specification and the appended claims, the singular forms “a,” “an” and “the” include plural references unless the content clearly dictates otherwise.

Identification of Proteins that are Differentially Regulated in Cancer Cells

[0039] Proteomics-based Change Mediated Antigen Technology (PCMAT) is a method for identifying proteins and polypeptides and their cognate genes or polynucleotides that are specifically expressed when a cell undergoes a change (e.g., change from a normal, healthy cell to a diseased cell) or is exposed to a change in environmental conditions (e.g., change of a plant cell going from moist to arid conditions). PCMAT can be used to identify proteins and polypeptides and their cognate genes or polynucleotides that are up-regulated or are specifically expressed in cells when the cells become diseased or cancerous.

[0040] By “specifically expressed” is meant that the protein or polypeptide is expressed to a greater or lesser extent under a first environmental condition as compared to a second environmental condition. For example, the protein or polypeptide might be expressed under a first environmental condition but not expressed under a second environmental condition. Alternatively, the protein or polypeptide might be expressed to a greater extent, for example 10%, 20%, 50%, 100%, 200%, or more, in the first environmental condition as compared to the second environmental condition.

[0041] First environmental conditions include, but are not limited to, a disease condition (such as, for example, a viral disease, a bacterial disease, a fungal disease, a disease caused by a prion, a disease caused by a protozoan, a parasitic disease, cancer, an autoimmune disease (e.g., arthritis, chronic inflammatory bowel disease, or diabetes), heat, cold, exposure to toxic chemicals, exposure to drugs, exposure to chemotherapy drugs or regimens, exposure to stress, exposure to toxic metals, exposure to radiation, exposure to toxins, exposure to antibiotics, exposure to chemicals meant to kill or slow the growth of the microbe such as bactericides, viricides, and bacteriostatic or viristatic agents, low oxygen conditions, high oxygen conditions, low pH conditions, high pH conditions, exposure to iron, exposure to low levels of nutrients, and exposure to high levels of nutrients.

[0042] A second environmental condition can be, for example, normal conditions, healthy conditions, non-diseased conditions, and/or the absence of the first environmental conditions. In one embodiment of the invention, a first environmental condition can be one stage or phase of a disease (e.g., early, middle, late, chronic, treated, untreated, treatment for a certain amount of time, remission) and the second environmental condition can be a second, different stage of a disease (e.g., early, middle, late, chronic, treated, untreated, treatment for a certain amount of time, remission).

[0043] One embodiment of the invention provides a method for isolating a protein, polypeptide or other component of a cell (e.g., lipid, carbohydrate, or glycoprotein) that is expressed under a first environmental condition (e.g., a diseased condition) and not under a second environmental condition (e.g., a healthy or non-diseased condition). In general, the method comprises obtaining a first sample from a host in a first condition (e.g., a diseased condition) and immunizing a second animal with the host sample. Antibodies from the immunized animal are collected and adsorbed with host samples collected from a second host under a second environment condition (e.g., healthy conditions). The second host can be the same individual first host under the second conditions (e.g. healthy tissues or cells from the first host) or a different host of the same or different species as the first host. Unadsorbed antibodies are collected and used to collect differentially expressed proteins, polypeptides or other components directly from diseased tissue or fluid of the first host or from an expression or display library of the host's DNA or RNA or similar DNA or RNA.

[0044] The host exposed to the first environmental condition can be any type of organism, for example, a mammal, such as a human, baboon, chimpanzee, macaque, cattle, sheep, pig, horse, goat, dog, cat, rabbit, guinea pig, rat, or mouse. An animal can also be, for example, a chicken, duck, insect, or fish. The host can also be a member of the plant or microbial kingdom.

[0045] In the case where the host is from the animal kingdom, the sample collected from a host in the first environmental condition can be, for example, cells, cell extracts, tissue, bodily fluid, bodily fluid substantially lacking cells (e.g., less than about 1, 5, or 10% cells), serum, urine, tears, milk, seminal fluid, prostatic fluid, lung lavage fluid, saliva, mucosal cells, tumor cells, cancer cells, a biopsy sample, a lavage sample, sputum, plasma, blood, a fecal sample, a lymph node sample, bone marrow, colon tissue, rectal tissue, or a pleural effusion sample. Where the host is a plant, the sample can be from, e.g., cells, tissues, cell extracts, fluid extracted from phloem, fluid extracted from xylum. Wherein the host is a microbe, bacterium, virus or prion the sample can be cells or cell extracts, or cells or tissues of a host infected or colonized by the microbe.

[0046] Samples from animal host in a first environmental condition can be collected and processed immediately for immunization or are quickly frozen for later processing to preserve as closely as possible all of the potential epitopes that were present in the host animal sample at the moment the sample was taken. Individual samples or pooled samples collected at different time intervals or from different sampling sites or from different animals exposed to the same first environmental condition or similar environmental conditions can be used to immunize an animal to obtain an antibody response.

[0047] Antibodies from the immunized animal are collected. The immunized animal can be any type of animal capable of mounting a humoral immune response, for example, a mammal, such as a human, baboon, chimpanzee, macaque, cattle, sheep, pig, horse, goat, dog, cat, rabbit, guinea pig, rat, or mouse. An animal can also be, for example, a chicken, duck, insect, or fish. In one embodiment, the immunized animal is the same species as the first host animal. In another embodiment, the immunized animal is a different species from the first host animal. In another embodiment, the immunized animal is a different species from the first host animal wherein the immunized animal is distantly related to the first host animal (e.g., the first host animal is a human and the immunized animal is a chicken).

[0048] In the case where a bodily fluid is used as the immunogen, the fluid sample does not need to come from the site of the first environmental condition. That is, the bodily fluid does not need to be collected from the direct site of the diseased tissue or cancerous lesion, but instead can be, e.g., scrum drawn from a site away from the diseased tissue or cancerous lesion.

[0049] The immunization of animals with an antigen sample for the production of antibodies is well known in the art. See e.g., Antibody Techniques, Malik &Lillehoj, eds., Academic Press (1994); Antibodies: A Laboratory Manual, Harlow & Lane, eds., Cold Spring Harbor Laboratories (1988). A sample can be homogenized before administration to an animal. Administration can be by, for example, intramuscular, interperitoneal, subcutaneous, intradermal, intravenous, or nasal/inhalation, or combinations thereof.

[0050] The administration of the sample to the animal can be combined with an adjuvant. Alternatively, an adjuvant can be administered to the animal separately. An adjuvant can enhance an immune response to an antigen. An adjuvant can be, for example, complete Freund's adjuvant (CFA), Incomplete Freund's Adjuvant (IFA), montanide ISA (incomplete Seppic adjuvant), Ribi Adjuvant System (RAS), TiterMax®, Syntex Adjuvant Formulation (SAF), aluminum salt adjuvants, nitrocellulose-adsorbed antigen, encapsulated or entrapped antigens, immune-stimulating complexes (ISCOMs), for example Quil A or QS-21, and Gerbu® adjuvant. One of skill in the art can choose an appropriate adjuvant for a particular sample.

[0051] Booster administrations of the host samples from a first environmental condition can be given to the animal at, for example, 2 weeks, 1 month, two months, or three months after the immunization.

[0052] After an immune response occurs in the animal, an antibody sample is collected from the immunized animal. The sample can comprise, for example, the serum of an immunized animal. The animal's serum will contain antibodies, including antibodies specific for antigens expressed under the first environmental condition by the host animal (e.g., a diseased condition). Antibodies collected from an individual immunized animal can be used or antibodies pooled from two or more animals can be used. For example, antibodies collected from about 2, 5, 25, 100, 500, or 1,000 animals can be pooled.

[0053] Antibodies that bind to antigens that are produced under a second environmental condition, e.g., a healthy or non-disease condition are subtracted from the sample of antibodies. The result is an “unadsorbed antibody” sample. The antibodies are collected from the immunized animal and adsorbed with an animal host sample comparable to the one used to produce the antibodies, except that this sample is obtained from a host animal that is in the second environmental condition (e.g., healthy, normal or a condition that differs from the first environmental condition). The animal host sample (i.e., a host sample collected from a host animal in the second environmental condition) can be, for example, cells, cell extracts, tissue, bodily fluid, bodily fluid substantially lacking cells (e.g., less than about 1, 5, or 10% cells), serum, urine, tears, milk, seminal fluid, prostatic fluid, lung lavage fluid, saliva, mucosal cells, tumor cells, cancer cells, a biopsy sample, a lavage sample, sputum, plasma, blood, a fecal sample, a lymph node sample, bone marrow, colon tissue, rectal tissue, a pleural effusion sample, microbial or plant cells, tissues, or cell extracts. The adsorption removes antibodies that are reactive with proteins and other cell components made by the host in the second environmental condition (e.g., in the absence of disease). Unadsorbed antibodies that are reactive with antigens expressed by the animal host under the first environmental condition are recovered and used to capture proteins, polypeptides and other components specifically expressed by the host under the first environmental condition. The source of the proteins and polypeptides can be extracts of the tissues or bodily fluids from the animal in the first environmental condition. Alternatively, an expression or display library of the host's DNA or RNA can be used as the source of proteins. Proteins specifically captured by the adsorbed antibodies are eluted, concentrated and identified by proteomic methods known to persons skilled in the art (e.g., GeLC-MS/MS). In the case where surface display libraries are used, the cloned genetic fragment encoding the displayed protein is sequenced and the protein expressed by this fragment is deduced.

[0054] The adsorption step can be performed by, for example, contacting the antibody sample with host samples from the second environmental condition that are immobilized on a solid support, such as a nitrocellulose membrane or latex beads. See, Brady & Daphtary, J. Infect. Dis. 158:965-972 (1988). Optionally, the host sample from the second environmental condition can be denatured (e.g., by heating) before use to expose additional immunoreactive epitopes. Two or more successive adsorptions can be performed using the same or different adsorption methodologies.

[0055] All or substantially all of the antibodies in the antibody sample whose corresponding antigens are derived from a host under a second environmental condition will bind to these antigens to form immune complexes. However, antibodies directed against antigens that are specifically expressed under the first environmental condition will remain uncomplexed since their corresponding antigens are not present in the host sample under the second environmental condition. The uncomplexed antibodies comprise the unadsorbed antibody sample.

[0056] Polypeptides can be expressed from polynucleotides of the invention. The polypeptides can then be used to generate antibodies that specifically bind to an immunological epitope present in the polypeptides of the invention. Antibodies of the invention are antibody molecules that specifically bind to a polypeptide of the invention or fragment thereof. An antibody of the invention can be a polyclonal antibody, a monoclonal antibody, a single chain antibody (scFv), or an antigen-binding fragment of an antibody.

[0057] Antigens induced under a first environmental condition can be directly verified as actually expressed by the animal host in response to a first environmental condition by directly probing biological samples taken from, e.g., disease sites or from bodily fluid samples by any method known in the art. For example, monoclonal antibodies generated against a change mediated protein can be raised and tested for their specificity and cross reactivity to other proteins or polypeptides that are known to be or may be present in the test sample. Monoclonal antibodies that show appropriate specificity for epitopes on change mediated proteins or polypeptides can be labeled by various methods and tested for their reactivity with appropriate biological samples including tissues or bodily fluids from the host in both environmental conditions one and two. The labeled antibodies will react with the biological sample from the host in condition one (i.e., diseased), but will not react with the biological sample from the host in condition two (i.e., healthy or non-diseased). These results provide direct evidence that the host specifically expresses the antigen of interest under a first environmental condition, and that the change mediated protein or polypeptide so identified has potential for use in diagnosis, prevention, and therapy of the disease condition.

[0058] Samples taken at regular intervals throughout the course of disease will assure the presence of proteins and other potentially important cell components that can be transiently expressed. The more samples that are taken, the better the likelihood that the entire array of specifically expressed components will be obtained. The samples obtained in different time stages of disease or first conditions can be combined for immunization. Alternatively, they can be used to separately immunize animals to determine the approximate time during the disease that a particular protein or other cell component is expressed.

[0059] For example, comparing proteins and polypeptides of a animal host that are expressed under a first environmental condition at different stages of disease can comprise immunizing an animal with a first sample comprising one or more animal host samples under a first environmental condition, wherein each of the one or more host samples is in about the same stage of disease progression or treatment phase (e.g., early, middle, late, chronic, treated, untreated, treatment for a certain amount of time, remission). The stage or treatment phase of the first condition can be ascertained by, for example, by a medical professional. Antibodies from the immunized animal are collected and adsorbed with a host sample under a second environmental condition (e.g., a healthy or normal condition). Unadsorbed antibodies are collected and used as described above to identify change mediated proteins and polypeptides that are expressed throughout the entire timecourse of the disease, with and without remission, and with and without treatment).

[0060] An animal is immunized with a second host sample comprising one or more host samples under the first environmental condition, wherein each of host samples is in about the same stage of disease progression or same treatment phase, wherein the stage or phase is different from the stage or phase a described above. Antibodies from the immunized animal are collected and adsorbed with host samples under a second environmental condition. Unadsorbed antibodies are collected and used as described above to identify change mediated proteins and polypeptides that are specifically expressed at particular stages of the disease or those that are specifically expressed in response to remission or treatment.

### Colorectal Cancer Application of PCMAT Techniques

[0061] PCMAT and variations of PCMAT were used herein to identify polynucleotides that are expressed when healthy colorectal cells become cancerous colorectal cells. Adenocarcinoma tissues were obtained from Asterand XpressBank (Detroit, Mich.). The samples were harvested and quick frozen to preserve intact any potential antigen that was present at the time of harvest. The identity of the diseased tissue and staging were performed by clinical and histopathological examination. Integrity of the tissue sample was confirmed by RNA profile. From a potential list of approximately 200 available tissue samples, 4 samples were selected based on the following criteria: adenocarcinoma was the principal diagnosis; stages 1, 2, 3 and 4 were represented based on the AJCC/UICC classification scheme; the RNA profile indicated that minimal degradation of the tissue had occurred during the period following harvesting and quick freezing; the diseased tissue was from the large bowel; paired (homologous), healthy tissue (confirmed by clinical and histopathological examination) was available; and the samples represented both males and females.

[0062] Each of the 4 cancerous tissue samples (stage 1, 2, 3 and 4) was processed independently and subjected to PCMAT, which identified proteins and polypeptides that are specifically expressed in the adenocarcinoma samples relative to the proteins that are expressed in healthy bowel tissue.

[0063] Briefly, the adenocarcinoma samples were homogenized in PBS and samples from each cancer stage were individually used to immunize appropriate animals. Chickens, which are phylogenetically distant from humans, were chosen for this step to optimize the strength and breadth of the immune response. A strong adjuvant (Complete Freund's Adjuvant) was also used for this purpose. Colorectal cancer stage-specific polyclonal immunoglobulin (PAbs) was obtained from egg yolks of immunized animals. To selectively enrich for immunoglobulin directed against protein antigens unique to colon carcinoma tissues and concomitantly deplete immunoglobulin directed against protein antigens expressed by cells comprising both healthy and cancerous tissues, homogenates of healthy, autologous bowel tissue were prepared as for the diseased tissue. Antibodies reactive with proteins expressed by healthy bowel tissue were depleted from the immunoglobulin by adsorption using the UltraBind affinity membranes with covalently coupled proteins from healthy tissues. The procedure was repeated until essentially no reactivity was observed in ELISA or western blots between the adsorbed immunoglobulin and the paired healthy tissue homogenates. Immunoglobulin depleted of antibodies reactive with constitutively expressed protein antigens from healthy tissues were subjected to another round of adsorption with whole cells and lysates of the Escherichia coli host strain/pET30 grown with inducer (1 mM IPTG) to remove any antibodies reactive or cross-reactive with contaminants in the cDNA libraries.

[0064] Change mediated proteins were captured using the unadsorbed antibodies remaining after the adsorption steps using two different sources. The first source was the homogenates of diseased tissue (stages 1, 2, 3, and 4) used to immunize the animals. The second source was a normalized cDNA library, NCI_CGAP_Col4, which was obtained from the I.M.A.G.E. consortium. This library reportedly was constructed using cDNA generated by reverse transcription of mRNA isolated from moderately differentiated colon adenocarcinoma, and cloning into the shuttle vector, pCMV-SPORT6.

[0065] Adsorbed immunoglobulin preparations were covalently bound to M-280 Tosyl-activated Dynabeads according to the manufacturer's (Dynal Biotech) directions to create “charged” magnetic beads. For immunocapture, 5 ml of previously prepared diseased tissue homogenates or cDNA expression library fractions containing recombinant proteins at a concentration of 1 mg/ml were incubated with 0.5 ml of charged beads for 2 h at 4° C. with tilt rotation. Following immunocapture, charged beads were washed with 10 bead volumes of wash buffer (PBS-0.2% NOG).

[0066] Specifically bound proteins were eluted three times with 1M acetic acid. All wash and elution fractions were collected for analysis. Following elution, the specifically bound proteins were immediately neutralized by addition of 10 volumes of 0.2 M Na₂PO₄ (pH 7.4) and stored at 4° C. in the presence of 0.02% sodium azide until further use. A negative control consisted of an identical volume of beads charged with preimmune immunoglobulin and treated as above to capture non-specifically bound proteins. Eluates from charged columns treated with soluble lysates from the cDNA library, and homogenates of the tumors clearly demonstrated the presence of proteins that were absent in the negative controls.

[0067] Proteins specifically bound by columns charged with adsorbed immunoglobulin were identified by GeLC-MS/MS at the University of Florida Interdisciplinary Center for Biotechnology Research (ICBR). Specifically bound recombinant proteins eluted from charged columns above were concentrated, fractionated on 1D SDS-PAGE, and digested in-gel with trypsin prior to tandem MS/MS. Fractions of the 1D-lane were reduced, alkylated, and digested with trypsin (Promega). The enzymatically-digested samples were separated using a C18 Pep Map HPLC column with elution using a formic acid gradient. GeLC-MS/MS analysis was carried out on a hybrid quadrupole-TOF mass spectrometer (QSTAR, Applied Biosystems, Framingham, Mass.). All MS/MS samples were analyzed using Mascot version 2.0.01 (Matrix Science, London, UK) and Scaffold (version Scaffold-01-06-03, Proteome Software Inc., Portland, Oreg.). Change mediated antigens identified were analyzed via bioinformatics by querying the human genomic sequence database.

[0068] Proteins and their cognate polynucleotides that are upregulated in stage 1 cancerous cells were identified. The identified polypeptides and proteins are as follows: Titin (also known as TTN rhabdomyosarcoma antigen MU-RMS 40) (e.g., GenBank Accession Number Q8WZ42-2 (SEQ ID NO:1)); HBA1 (e.g., GenBank Accession Number P69905 (SEQ ID NO:2)); Insulin-like growth factor 1 receptor (IGF1R) (e.g., GenBank Accession Number P08069 (SEQ ID NO:3)); Isoform 3 or zonadhesin precursor (e.g., GenBank Accession Number Q9Y493-1 (SEQ ID NO:4)); latent transforming growth factor beta binding protein 4 (LTBP4) (e.g., UniProt Accession Number A6NCG8 (SEQ ID NO:5)); ASXL1 (additional sex combs like 1) (e.g., GenBank Accession Number Q8IXJ9-1 (SEQ ID NO:6)); beta globin (HBB) (e.g., GenBank Accession Number P68871 (SEQ ID NO:7)); BMP15-bone morphogenetic protein (e.g., GenBank Accession Number NM_{—}005448.1 (see also, UniProt Accession Number O95972) (SEQ ID NO:8)); TRIM49 (also known as RNF18; tripartite motif-containing 49) (e.g., GenBank Accession Number Q9NS80 (SEQ ID NO:9)); DNAJ homolog subfamily B member 11 precursor (e.g., GenBank Accession Number Q9UBS4 (SEQ ID NO:10)); uncharacterized hematopoietic stem/progenitor cells protein MDS027 (also known as MDS027 hHBrk1 HSPC300) GenBank Accession Number Q9NZ47 (SEQ ID NO:11)); uncharacterized protein ALB (e.g., UniProt Accession Number A6NBZ8 (SEQ ID NO:12)); isoform 3 of sushi, nidogen and EGF-like domain-containing protein 1 precursor (e.g., GenBank Accession Number Q8TER0-4 (SEQ ID NO:13)); isoform 2 of peripherin (e.g., GenBank Accession Number P41219-2 (SEQ ID NO:14)); mitochondrial 28S ribosomal protein S22 (e.g., GenBank Accession Number P82650 (SEQ ID NO:15)); translation initiation factor EIF-2B subunit epsilon (e.g., GenBank Accession Number Q13144 (SEQ ID NO:16)); estradiol 17-beta-dehydrogenase 1 (e.g., GenBank Accession Number P14061 (SEQ ID NO:17)); XRCC6BP1 (e.g., GenBank Accession Number Q8N4L5 (SEQ ID NO:18)); brain-specific angiogenesis inhibitor 1 precursor (e.g., GenBank Accession Number O14514 (SEQ ID NO:19)); isoform 2 of ring finger and CCCH-type zinc finger domain-containing protein 2 (e.g., GenBank Accession Number Q91-HBD1-2 (SEQ ID NO:20)); hemoglobin subunit beta (e.g., GenBank Accession Number P68871 (SEQ ID NO:21)); isoform 1 of far upstream element-binding protein 1 (e.g., GenBank Accession Number Q96AE4-1 (SEQ ID NO:22)); GALECTIN-3 (e.g., GenBank Accession Number P17931 (SEQ ID NO:23)); lysozyme C precursor (e.g., GenBank Accession Number P61626 (SEQ ID NO:24)); actin, alpha skeletal muscle (e.g., GenBank Accession Number P68133 (SEQ ID NO:25)); isoform M2 of pyruvate kinase isozymes M1/M2 (e.g., GenBank Accession Number P14618-1 (SEQ ID NO:26)); AGR2 (e.g., GenBank Accession Number O95994 (SEQ ID NO:27)); neutrophil defensin 1 precursor (e.g., GenBank Accession Number P59665 (SEQ ID NO:28)); myeloblastin precursor (e.g., GenBank Accession Number P24158 (SEQ ID NO:29)); uncharacterized protein PSME2 (e.g., GenBank Accession Number Q9UL46 (SEQ ID NO:30)); tubulin beta-2C chain (e.g., UniProt Accession Number P68371 (SEQ ID NO:31)); thiosulfate sulfurtransferase (e.g., GenBank Accession Number Q16762 (SEQ ID NO:32)); heat shock 70 kDa protein 1(e.g., GenBank Accession Number P08107 (SEQ ID NO:33)); Ig kappa chain V-III region sie (e.g., GenBank Accession Number P01620 (SEQ ID NO:34)); macrophage migration inhibitory factor (e.g., GenBank Accession Number P14174 (SEQ ID NO:35)); isoform 1 of ATP synthase subunit D, mitochondrial (e.g., GenBank Accession Number O75947-1 (SEQ ID NO:36)); uncharacterized protein ENSP00000374051 (e.g., GenBank Accession Number A6NGM3 (SEQ ID NO:37)); isocitrate dehydrogenase [NADP] cytoplasmic (e.g., UniProt Accession Number O75874 (SEQ ID NO:38)); hemoglobin subunit delta (e.g., GenBank Accession Number P02042 (SEQ ID NO:39)); isoform 1 of splicing factor, arginine/serine-rich 7 (e.g., GenBank Accession Number Q16629-1 (SEQ ID NO:40)); isoform 1 of mRNA-capping enzyme (e.g., GenBank Accession Number O60942-1 (SEQ ID NO:41)); LON protease homolog, mitochondrial precursor (e.g., GenBank Accession Number P36776 (SEQ ID NO:42)); signal recognition particle 54 kDa protein (e.g., GenBank Accession Number P61011 (SEQ ID NO:43)); isoform long of galectin-9 (e.g., GenBank Accession Number O00182-1 (SEQ ID NO:44)); integrin-linked protein kinase (e.g., GenBank Accession Number Q13418 (SEQ ID NO:45)); bifunctional aminoacyl-tRNA synthetase (e.g., GenBank Accession Number P07814 (SEQ ID NO:46)); isoform 1 of zinc finger protein 207 (e.g., GenBank Accession Number O43670-1 (SEQ ID NO:47)); inorganic pyrophosphatase (e.g., GenBank Accession Number Q15181 (SEQ ID NO:48)); calponin-2 (e.g., GenBank Accession Number Q99439 (SEQ ID NO:49)); isoform 1 of muscleblind-like protein 3 (e.g., GenBank Accession Number Q9NUK0-1 (SEQ ID NO:50)); cathepsin G precursor (e.g., GenBank Accession Number P08311 (SEQ ID NO:51)); zinc finger and BTB domain-containing protein 34 (e.g., GenBank Accession Number Q8NCN2 (SEQ ID NO:52)); adenine phosphoribosyltransferase (e.g., GenBank Accession Number P07741 (SEQ ID NO:53)); 40S ribosomal protein S9 (e.g., GenBank Accession Number P46781 (SEQ ID NO:54)); TALIN-1 (e.g., GenBank Accession Number Q9Y490 (SEQ ID NO:55)); leucine-rich repeat-containing protein 59 (e.g., GenBank Accession Number Q96AG4 (SEQ ID NO:56)); ATP synthase subunit alpha, mitochondrial precursor (e.g., GenBank Accession Number P25705 (SEQ ID NO:57)); isoform 7 of protein transport protein SEC31A (e.g., GenBank Accession Number O94979-7 (SEQ ID NO:58)); dihydroxyacetone kinase (e.g., GenBank Accession Number Q3LXA3 (SEQ ID NO:59)); protein similar to heterogeneous nuclear ribonucleoproteins C1/C2 (HNRNP C1/HNRNP C2) isoform 4 (e.g., ENSEMBL Accession Number ENST0000342709 (see also, GenBank Accession No. NM_{—}004500.3 and UNIPARC Accession Number IP100868835) (SEQ ID NO:60)); 18 kDa protein (e.g., UNIPARC Accession Number IP100796554 (SEQ ID NO:61)); cold agglutinin FS-1 L-chain (e.g., GenBank Accession Number A2NB45 (SEQ ID NO:62)); isoform 1 of heterogeneous nuclear ribonucleoprotein d0 (e.g., UniProt Accession Number Q14103-1 (SEQ ID NO:63)); DAZAP1/MEF2D fusion protein (e.g., GenBank Accession Number Q51RN2 (SEQ ID NO:64)).

[0069] Proteins and their cognate polynucleotides that are upregulated in stage IV cancerous cells were also identified. The polynucleotides encode the following polypeptides: POTE2 (also known as ANKRD26-like family C, member 1A) (e.g., GenBank Accession Number NP_{—}001077007 (SEQ ID NO: 65)); keratin 18 (KRT18) (e.g., GenBank Accession Number NP_{—}000215 (SEQ ID NO: 66)); PSME4 Isoform 1 of Proteasome activator complex subunit (also known as prosome macropain, activator subunit 4) (e.g., GenBank Accession Number NP_{—}055429 (SEQ ID NO: 67)); Mitogen-activated protein kinase-activated protein kinase (MAPKAPK33) (e.g., GenBank Accession Number NP_{—}004626 (SEQ ID NO: 68)); Complement component 1, s subcomponent (C1S) (e.g., GenBank Accession Number NP_{—}001725 (SEQ ID NO: 69)); Lysozyme C precursor (LYZ) (e.g., GenBank Accession Number NP_{—}000230 (SEQ ID NO: 70)); Keritin Type Cytoskeletal 20 (KRT20) (e.g., GenBank Accession Number NP_{—}061883 (SEQ ID NO: 71)); RNASE3 (also known as ECP RNS3, ribonuclease, RNase A family 3) (e.g., GenBank Accession Number NP_{—}002926 (SEQ ID NO: 72)); Aldehyde dehydrogenase X, mitochondrial precursor (ALDH1B1) (e.g., GenBank Accession Number NP_{—}000683 (SEQ ID NO: 73)); CDNA FLJ25506 fis, clone CBR05185 (e.g., GenBank Accession Number Q8N716 (SEQ ID NO: 74)); Isoform B of fibulin-1 precursor (FBLN1) (e.g., GenBank Accession Number P23142-2 (SEQ ID NO: 75)); Nucleobindin 1 (NUCB1) (e.g., GenBank Accession Number NP_{—}006175 (SEQ ID NO: 76)); Historic cluster 2, H2ba (HIST2H2BA) (e.g., GenBank Accession Number NP_{—}001019770 (SEQ ID NO: 77)); Tripartite motif-containing 28 (TRIM28) (e.g., GenBank Accession Number NP_{—}005753 (SEQ ID NO: 78)); Peroxisomal D3, D2 enoyl-CoA isomerase (PECI) (e.g., GenBank Accession Number NP_{—}006108 (SEQ ID NO: 79)); Peptidylprolyl isomerase B (PPIB) (e.g., GenBank Accession Number NP_{—}000933 (SEQ ID NO: 80)); Similar to 40S ribosomal protein S17 (e.g., GenBank Accession Number IP00743305 (SEQ ID NO: 81)); Eukaryotic translation elongation factor 1 gamma (EEF1G) (e.g., GenBank Accession Number IP100747497 (SEQ ID NO: 82)); Keratin 8 (KRT8) (e.g., GenBank Accession Number NP_{—}002264 (SEQ ID NO: 83)); Fibulin 2 (FBLN2) (e.g., GenBank Accession Number NP_{—}001989 (SEQ ID NO: 84)); VIM (e.g., GenBank Accession Number NP_{—}003371 (SEQ ID NO: 85)); Fibrinogen alpha chain (FGA) (e.g., GenBank Accession Number NP_{—}000499 (SEQ ID NO: 86)); Annexin A2 (ANXA2) (e.g., GenBank Accession Number NP_{—}001002858 (SEQ ID NO: 87)); H2A histone family, member J (H2AFJ) (e.g., GenBank Accession Number NP_{—}808760 (SEQ ID NO: 88)); Actin alpha, cardiac muscle 1 (ACTC1) (e.g., GenBank Accession Number NP_{—}005150 (SEQ ID NO: 89)); Keratin 19 (KRT19) (e.g., GenBank Accession Number NP_{—}002267 (SEQ ID NO: 90)); Immunoglobin lambda locus (IGL@protein) (e.g., GenBank Accession Number Q6PIQ7 (SEQ ID NO: 91)); immunoglobulin heavy constant mu (IGHM) (e.g., GenBank Accession Number Q8WUK1 (SEQ ID NO: 92)); EGF-containing Fibulin-like extracellular matrix protein 1 (EFEMP1) (e.g., GenBank Accession Number Q12805-3 (SEQ ID NO: 93)); Tripartite motif-containing protein 34 (e.g., GenBank Accession Number NP_{—}067629 (SEQ ID NO: 94)); Isoform 3 of AP1-subunit Gamma Binding Protein 1 (e.g., GenBank Accession Number NP_{—}542117 (SEQ ID NO: 95)); Proflin-1 (e.g., GenBank Accession Number NP_{—}005013 (SEQ ID NO:96)); Histone H4 (e.g., GenBank Accession Number NP_{—}001029249 (SEQ ID NO: 97)); Hemoglobin subunit alpha (e.g., GenBank Accession Number NP_{—}000549 (SEQ ID NO: 98)); Transgelin (also known as TAGLN) (e.g., GenBank Accession Number NP_{—}001001522 (SEQ ID NO: 99)); Lumican precursor (e.g., GenBank Accession Number NP_{—}002336 (SEQ ID NO: 100)); Hemoglobin Beta (also known as HBD CD113t) (e.g., GenBank Accession Number NP_{—}000509 (SEQ ID NO: 101)); Fibrinogen Beta Chain Precursor (e.g., GenBank Accession Number NP_{—}005132 (SEQ ID NO: 102)); immunoglobulin kappa constant (IGKC) (e.g., GenBank Accession Number Q6GMX8 (SEQ ID NO: 103)); Uncharacterized Protein ALB (also known as albumin) (e.g., GenBank Accession Number Q56G89 (SEQ ID NO: 104)).

[0070] In another example, PCMAT was used to identify proteins that are shed into body fluids during a diseased state, namely stage IV colorectal bowel cancer. See Example 1. This study used the YPAbs (polyclonal IgY antibodies) raised in chickens against adjuvanted homogenates of stage IV human colon cancer tissue. The YPAbs evoked from the stage IV tumor tissue were adsorbed with sera from healthy subjects bound to a solid support. After confirmation using western and dot blots that no remaining antibodies reactive with antigens present in healthy serum was established, the remaining unadsorbed antibodies were bound to a solid support resin to create a charged column as described above. Serum from patients with stage IV colorectal cancer was passed through the column, and non-specifically bound proteins and peptides were removed by washing. Specifically bound proteins were removed using acetic acid, which were identified by GeLC-MS/MS as described above. Stage II tumor tissue was used in the same manner to identify SEQ ID NOs:108-157 and are as follows: Actin, Cytoplasmic 1 (actin beta) (e.g., GenBank Accession Number NP_{—}001092 (SEQ ID NO:108)); Hemoglobin beta (e.g., GenBank Accession Number O95408 (SEQ ID NO:109)); Hemoglobin subunit alpha (e.g., GenBank Accession Number P69905 (SEQ ID NO:110)); POTE-2 alpha actin (e.g., GenBank Accession Number A5A3E0 (SEQ ID NO:111)); SLC4A10 (e.g., GenBank Accession Number Q6U841 (SEQ ID NO:112)); Ribonuclease P Protein Subunit P20 (POP7) (e.g., GenBank Accession Number O75817 (SEQ ID NO:113)); Nuclear RNA export factor 1 (NXF1) (e.g., GenBank Accession Number Q59E96 (SEQ ID NO:114)); UVEAL Autoantigen With Coiled-Coil Domains And Ankyrin Repeats, UACA (e.g., GenBank Accession Number Q05DB3 (SEQ ID NO:115)); Uncharacterized Protein C13ORF27 (e.g., GenBank Accession Number Q5JUR7 (SEQ ID NO:116)); Isoform 3 of Sushi, Nidogen And EGF-Like Domain-Containing Protein 1 Precursor (e.g., GenBank Accession Number Q8TER0 (SEQ ID NO:117)); Isoform 1 Of Dynein Heavy Chain 10, Axonemal (DNAH10): (e.g., GenBank Accession Number Q8IVF4 (SEQ ID NO:118)); Gap junction alpha-1 protein (GJA1/Connexion 43) (e.g., GenBank Accession Number P17302 (SEQ ID NO:119)); Isoform 1 Of Kinesin-Like Protein KIF25 (KIF25) (e.g., GenBank Accession Number Q5SZU8 (SEQ ID NO:120)); GAPDH-Glyceraldehyde-3-Phosphate Dehydrogenase (e.g., GenBank Accession Number P04406 (SEQ ID NO:121)); Uncharacterized Protein ALB (e.g., GenBank Accession Number P02768 (SEQ ID NO:122)); Galectin-3, LGALS3 (e.g., GenBank Accession Number NP_{—}002297 (SEQ ID NO:123)); Similar to NAC-Alpha Domain-Containing Protein 1 (NACAD) (e.g., GenBank Accession Number O15069 (SEQ ID NO:124)); Acetyl-CoA Acetyltransferase, Mitochondrial, ACAT1 (e.g., GenBank Accession Number NP_{—}000010 (SEQ ID NO:125)); KH-Type Splicing Regulatory Protein, FUBP2 (e.g., GenBank Accession Number NP_{—}003676 (SEQ ID NO:126)); Profilin 1 (PFN1) (e.g., GenBank Accession Number NP_{—}005013 (SEQ ID NO:127)); Chloride Intracellular Channel Protein 1, CLIC1 (e.g., GenBank Accession Number NP_{—}001279 (SEQ ID NO:128)); Zinc Finger Protein 831 (e.g., GenBank Accession Number NP_{—}848552 (SEQ ID NO:129)); Endoplasmin (e.g., GenBank Accession Number NP_{—}003290 (SEQ ID NO:130)); Ribosomal Protein S10 (RPS10) (e.g., GenBank Accession Number P46783 (SEQ ID NO:131)); Splicing Factor, Arginine/Serine-Rich 3 (e.g., GenBank Accession Number NP_{—}003008 (SEQ ID NO:132)); ACTA2 Protein (alpha actin, smooth muscle) (e.g., GenBank Accession Number P62736 (SEQ ID NO:133)); Isoform 1 of Sodium Channel Protein Type 8 Subunit Alpha, SCN8A (e.g., GenBank Accession Number NP_{—}055006 SEQ ID NO:134)); Isoform Long of Galectin-9 GenBank Accession Number NP_{—}033665 SEQ ID NO:135)); T-Complex Protein 1 Subunit Epsilon, CCT5 (e.g., GenBank Accession Number NP_{—}036205 (SEQ ID NO:136)); Alpha-Enolase, Lung Specific (e.g., GenBank Accession Number CAA47179 (SEQ ID NO:137)); Proto-Oncogene Serine/Threonine-Protein Kinase MOS (e.g., GenBank Accession Number NP_{—}005363 (SEQ ID NO:138)); Isoform 1 Of Beta-Adducin (ADD2) (e.g., GenBank Accession Number NP_{—}001608 (SEQ ID NO:139)); Apolipoprotein E (APOE) (e.g., GenBank Accession Number NP_{—}000032 SEQ ID NO:140)); Ubiquitin-4 (UBQLN4) (ataxin-1 ubiquitin-like interacting protein) (e.g., GenBank Accession Number NP_{—}064516 (SEQ ID NO:141)); Sumo-Conjugating Enzyme UB21 (UBC9 homolog in yeast) (e.g., GenBank Accession Number NP_{—}003336 (SEQ ID NO:142)); Myosin-15 (MYH15) (e.g., GenBank Accession Number NP_{—}055796 (SEQ ID NO:143)); FLJ93091, Homo Sapiens UMP-CMP Kinase (UMP-CMPK) (e.g., GenBank Accession Number NP_{—}057392 (SEQ ID NO:144)); Intelectin-1 (ITLN1) (e.g., GenBank Accession Number NP_{—}060095 (SEQ ID NO:145)); Apolipoprotein A-IV (APOA4) (e.g., GenBank Accession Number Q13784 (SEQ ID NO:146)); Mitochondrial pyruvate dehydrogenase (lipoamide) alpha 1 (PDHA1) (e.g., GenBank Accession Number P08559 (SEQ ID NO:147)); Leucine-Rich Repeat-Containing Protein 59 (LRRC59) (e.g., GenBank Accession Number NP_{—}060979 (SEQ ID NO:148)); 60S Ribosomal Protein L37A (RPL37A) (e.g., GenBank Accession Number NP_{—}000989 (SEQ ID NO:149)); Uridine-Cytidine Kinase 1-like 1 (UCKL1) (e.g., GenBank Accession Number Q53HM1 (SEQ ID NO:150)); Aldehyde Dehydrogenase 9A1 (ALDH9A1) (e.g., GenBank Accession Number NP_{—}000687 (SEQ ID NO:151)); Isoform 3 Of Thioredoxin Reductase 1, Cytoplasmic (TXNRD1) (e.g., GenBank Accession Number Q16881 (SEQ ID NO:152)); Nuclear Receptor Subfamily 2 Group E Member 1 (NR2E1) (e.g., GenBank. Accession Number NP_{—}003260 (SEQ ID NO:153)); Cation Channel Sperm-Associated Protein 3 (CATSPER3) (e.g., GenBank Accession Number NP_{—}821138 (SEQ ID NO:154)); Transmembrane EMP24 Domain-Containing Protein 1 (TMED1) (e.g., GenBank Accession Number NP_{—}006849 (SEQ ID NO:155)); Protein FAM154A (FAM154A) (e.g., GenBank Accession Number NP_{—}714918 (SEQ ID NO:156)); Isoform 1 of Transcriptional Repressor NF-X1 (NFX1) (e.g., GenBank Accession Number NP_{—}002495 (SEQ ID NO:157)).

[0071] Shed change mediated proteins and their cognate polynucleotides that are upregulated in stage IV cancerous cells were identified. The polynucleotides encode the polypeptides shown in SEQ ID NOs:105-107 (ApoA1 e.g., GenBank Accession Number P02647 (SEQ ID NO:105); C4A (e.g., GenBank Accession Number P0C0L4 (SEQ ID NO:106); and C3 187 kDa protein (e.g., GenBank Accession Number P01024 (SEQ ID NO:107)).

[0072] In general, PCMAT has a number of outstanding attributes, including its speed (the entire biomarker discovery portion of the project can be performed in less than 6 months), cost efficiency, and, most importantly, its sensitivity. In general, chickens serve as an excellent host in which to raise high titer, broadly reactive antibodies: they tolerate very strong adjuvants extremely well, they are phylogenetically distant from humans, which makes them more likely to respond to human immunogens in cancer studies, they have a very large immune repertoire, and enormous amounts of purified IgY (essentially identical to IgG) can be readily obtained from their eggs. The use of strong adjuvants helps to assure that even low abundance proteins will elicit an antibody response and will be recovered. Another aspect of PCMAT that promotes sensitivity is that the size of the charged column and the amount of the body fluid that can be passed through it can be substantial. Again, this promotes the likelihood of finding low abundance proteins. Finally, the subtraction step in which fluids from healthy subjects are used to remove antibodies reactive with background proteins results in a tremendously increased signal to noise ratio. The need for sensitivity as provided by PCMAT cannot be overstated. It is highly likely that cancerous proteins that are shed into body fluids are of relatively low-abundance, and therefore missed by strategies that are currently in use. The use of PCMAT to find cancerous shed proteins presents a unique opportunity for the identification of novel target for the development of diagnostics for cancer.

[0073] All of these polypeptides are referred to herein as “the polypeptides of the invention” or “cancer-associated antigens or polypeptides.” The polynucleotides that encode the polypeptides of the invention are referred to herein as “the polynucleotides of the invention” or “cancer-associated polynucleotides.”

### Polypeptides

[0074] A polypeptide is a polymer of three or more amino acids covalently linked by amide bonds. A polypeptide can be post-translationally modified. A purified polypeptide is a polypeptide preparation that is substantially free of cellular material, other types of polypeptides, chemical precursors, chemicals used in synthesis of the polypeptide, or combinations thereof. A polypeptide preparation that is substantially free of cellular material, culture medium, chemical precursors, and/or chemicals used in synthesis of the polypeptide has less than about 30%, 20%, 10%, 5%, 1% or more of other polypeptides, culture medium, chemical precursors, and/or other chemicals used in synthesis. Therefore, a purified polypeptide is about 70%, 80%, 90%, 95%, 99% or more pure.

[0075] A polypeptide of the invention can comprise at least 1, 2, 3, 4, 5, 10, 25, 100, 500, 1,000 or more non-naturally occurring amino acids immediately contiguous with one or both of the amino and carboxy termini of the polypeptide.

[0076] Polypeptides of the invention can either be full-length polypeptides or proteins or fragments of polypeptides or proteins. For example, fragments of polypeptides of the invention can comprise about 5, 10, 15, 20, 30, 40, 50, 60, 70, 80, 90, 100, 250, 500, 750, 1,000, 2,000, 3,000, 4,000, 5,000 or more contiguous amino acids of polypeptides of the invention or any value or range between 5 and 5,000. Examples of polypeptides of the invention include those shown in SEQ ID NOs:1-157. Variant polypeptides are at least about 80, or about 85% 90, 91, 92, 93, 94, 95, 96, 97, 98, 99% or more identical to the polypeptide sequences shown in SEQ ID NOs:1-157. Variant polypeptides have one or more conservative amino acid variations or other minor modifications and retain biological activity, i.e., are biologically functional equivalents. A biologically active equivalent has substantially equivalent function when compared to the corresponding wild-type polypeptide.

[0077] Percent sequence identity has an art recognized meaning and there are a number of methods to measure identity between two polypeptide or polynucleotide sequences. See, e.g., Lesk, Ed., Computational Molecular Biology, Oxford University Press, New York, (1988); Smith, Ed., Biocomputing: Informatics And Genuine Projects, Academic Press, New York, (1993); Griffin & Griffin, Eds., Computer Analysis Of Sequence Data, Part I, Humana Press, New Jersey, (1994); von Heinje, Sequence Analysis In Molecular Biology, Academic Press, (1987); and Gribskov & Devereux, Eds., Sequence Analysis Primer, M Stockton Press, New York, (1991). Methods for aligning polynucleotides or polypeptides are codified in computer programs, including the GCG program package (Devereux et al., Nuc. Acids Res. 12:387 (1984)), BLASTP, BLASTN, FASTA (Atschul et al., J. Molec. Biol. 215:403 (1990)); and Bestfit program (Wisconsin Sequence Analysis Package, Version 8 for Unix, Genetics Computer Group, University Research Park, 575 Science Drive, Madison, Wis. 53711) which uses the local homology algorithm of Smith and Waterman (Adv. App. Math., 2:482-489 (1981)). For example, the computer program ALIGN which employs the FASTA algorithm can be used, with an affine gap search with a gap open penalty of −12 and a gap extension penalty of −2.

[0078] When using any of the sequence alignment programs to determine whether a particular sequence is, for instance, about 95% identical to a reference sequence, the parameters are set such that the percentage of identity is calculated over the full length of the reference polynucleotide and that gaps in identity of up to 5% of the total number of nucleotides in the reference polynucleotide are allowed.

[0079] Variants can generally be identified by modifying one of the polypeptide sequences of the invention, and evaluating the properties of the modified polypeptide to determine if it is a biological equivalent. A variant is a biological equivalent if it reacts substantially the same as a polypeptide of the invention in an assay such as an immunohistochemical assay, an enzyme-linked immunosorbent assay (ELISA), a radioimmunoassay (RIA), immunoenzyme assay or a western blot assay, e.g. has 90-110% of the activity of the original polypeptide. In one embodiment, the assay is a competition assay wherein the biologically equivalent polypeptide is capable of reducing binding of the polypeptide of the invention to a corresponding reactive antigen or antibody by about 80, 95, 99, or 100%. An antibody that specifically binds a corresponding wild-type polypeptide also specifically binds the variant polypeptide. Variant polypeptides of the invention can comprise about 1, 2, 3, 4, 5, 10, 20, 30, 40, 50, 60, 70, 80, 100, 200 or more conservative amino acid substitutions or any value or range of substitutions between about 1 and about 200.

[0080] A conservative substitution is one in which an amino acid is substituted for another amino acid that has similar properties, such that one skilled in the art of peptide chemistry would expect the secondary structure and hydropathic nature of the polypeptide to be substantially unchanged. Conservative substitutions include swaps within groups of amino acids such as replacement of the aliphatic or hydrophobic amino acids Ala, Val, Leu and Ile; replacement of the hydroxyl residues Ser and Thr; replacement of the acidic residues Asp and Glu; replacement of the amide residues Asn and Gln, replacement of the basic residues Lys, Arg, and His; replacement of the aromatic residues Phe, Tyr, and Trp, and replacement of the small-sized amino acids Ala, Ser, Thr, Met, and Gly.

[0081] A polypeptide of the invention can further comprise a signal (or leader) sequence that co-translationally or post-translationally directs transfer of the protein. The polypeptide can also comprise a linker or other sequence for case of synthesis, purification or identification of the polypeptide (e.g., poly-His), or to enhance binding of the polypeptide to a solid support. A polypeptide of the invention can further comprise a signal (or leader) sequence that co-translationally or post-translationally directs transfer of the protein. The polypeptide can also comprise a linker or other sequence for ease of synthesis, purification or identification of the polypeptide (e.g., poly-His), or to enhance binding of the polypeptide to a solid support. For example, a polypeptide can be conjugated to an immunoglobulin Fc region or bovine serum albumin.

[0082] A polypeptide can be covalently or non-covalently linked to an amino acid sequence to which the polypeptide is not normally associated with in nature. A polypeptide can also be covalently or non-covalently linked to compounds or molecules other than amino acids. For example, a polypeptide can be linked to an indicator reagent, an amino acid spacer, an amino acid linker, a signal sequence, a stop transfer sequence, a transmembrane domain, a protein purification ligand, or a combination thereof. In one embodiment of the invention a protein purification ligand can be one or more amino acid residues at, for example, the amino terminus or carboxy terminus of a polypeptide of the invention. An amino acid spacer is a sequence of amino acids that are not usually associated with a polypeptide of the invention in nature. An amino acid spacer can comprise about 1, 5, 10, 20, 100, 500, 1,000 or more amino acids.

[0083] If desired, a polypeptide can be a fusion protein, which can also contain other amino acid sequences, such as amino acid linkers, amino acid spacers, signal sequences, TMR stop transfer sequences, transmembrane domains, as well as ligands useful in protein purification, such as glutathione-S-transferase, histidine tag, and staphylococcal protein A, or combinations thereof. More than one polypeptide of the invention can be present in a fusion protein. Fragments of polypeptides of the invention can be present in a fusion protein of the invention. A fusion protein of the invention can comprise one or more of SEQ ID NOs:1-157, fragments thereof, or combinations thereof.

[0084] Polypeptides of the invention can be in a multimeric form. That is, a polypeptide can comprise one or more copies of SEQ ID NOs:1-157 or a combination thereof. A multimeric polypeptide can be a multiple antigen peptide (MAP). See e.g., Tam, J. Immunol. Methods, 196:17-32 (1996).

[0085] Polypeptides of the invention can comprise an antigen that is recognized by an antibody. The antigen can comprise one or more epitopes (i.e., antigenic determinants). An epitope can be a linear epitope, sequential epitope or a conformational epitope. Epitopes within a polypeptide of the invention can be identified by several methods. See, e.g., U.S. Pat. No. 4,554,101; Jameson & Wolf, CABIOS 4:181-186 (1988). For example, a polypeptide of the invention can be isolated and screened. A series of short peptides, which together span an entire polypeptide sequence, can be prepared by proteolytic cleavage. By starting with, for example, 100-mer polypeptide fragments, each fragment can be tested for the presence of epitopes recognized in an ELISA. For example, in an ELISA assay a polypeptide, such as a 100-mer polypeptide fragment, is attached to a solid support, such as the wells of a plastic multi-well plate. A population of antibodies are labeled, added to the solid support and allowed to bind to the unlabeled antigen, under conditions where non-specific absorption is blocked, and any unbound antibody and other proteins are washed away. Antibody binding is detected by, for example, a reaction that converts a colorless substrate into a colored reaction product. Progressively smaller and overlapping fragments can then be tested from an identified 100-mer to map the epitope of interest.

[0086] A polypeptide of the invention can be produced recombinantly. A polynucleotide encoding a polypeptide of the invention can be introduced into a recombinant expression vector that can be expressed in a suitable expression host cell system using techniques well known in the art. A variety of bacterial, yeast, plant, mammalian, and insect expression systems are available in the art and any such expression system can be used. Optionally, a polynucleotide encoding a polypeptide can be translated in a cell-free translation system. A polypeptide can also be chemically synthesized or obtained from cancerous cells.

[0087] An immunogenic polypeptide of the invention can comprise an amino acid sequence shown in SEQ ID NOs:1-157. An immunogenic polypeptide can elicit antibodies or other immune responses (e.g., T-cell responses of the immune system) that recognize epitopes of polypeptides having SEQ ID NOs:1-157. An immunogenic polypeptide of the invention can also be a fragment of a polypeptide that has an amino acid sequence shown in SEQ NOs:1-157. An immunogenic polypeptide fragment of the invention can be about 5, 10, 15, 20, 30, 40, 50, 60, 70, 80, 90, 100, 250, 500, 750, 1,000, 2,000, 3,000, 4,000, 5,000 or more or any value or range between about 5 and about 5,000 amino acids in length.

### Polynucleotides

[0088] Polynucleotides of the invention contain less than an entire genome and can be single- or double-stranded nucleic acids. A polynucleotide can be RNA, mRNA, DNA, cDNA, genomic DNA, chemically synthesized RNA or DNA or combinations thereof. The polynucleotides can be purified free of other components, such as proteins, lipids and other polynucleotides. For example, the polynucleotide can be 50%, 75%, 90%, 95%, 96%, 97%, 98%, 99%, or 100% purified. The polynucleotides of the invention encode the polypeptides described above. In one embodiment of the invention the polynucleotides encode polypeptides of the invention and polypeptides shown in SEQ ID NOs:1-157, the complements thereof, or combinations thereof. Polynucleotides of the invention can comprise other nucleotide sequences, such as sequences coding for linkers, signal sequences, TMR stop transfer sequences, transmembrane domains, or ligands useful in protein purification such as glutathione-S-transferase, histidine tag, and staphylococcal protein A.

[0089] Polynucleotides of the invention can be isolated. An isolated polynucleotide is a polynucleotide that is not immediately contiguous with one or both of the 5′ and 3′ flanking genomic sequences that it is naturally associated with. An isolated polynucleotide can be, for example, a recombinant DNA molecule of any length, provided that the nucleic acid sequences naturally found immediately flanking the recombinant DNA molecule in a naturally-occurring genome is removed or absent. Isolated polynucleotides also include non-naturally occurring nucleic acid molecules. A nucleic acid molecule existing among hundreds to millions of other nucleic acid molecules within, for example, cDNA or genomic libraries, or gel slices containing a genomic DNA restriction digest are not to be considered an isolated or purified polynucleotide.

[0090] Polynucleotides of the invention can also comprise fragments that encode immunogenic polypeptides. Polynucleotides of the invention can encode full-length polypeptides or proteins, polypeptide fragments, and variant or fusion polypeptides.

[0091] Degenerate nucleotide sequences encoding polypeptides of the invention, as well as homologous nucleotide sequences that are at least about 80, or about 85, 90, 95, 96, 97, 98, 99% or more identical to the polynucleotide sequences of the invention and the complements thereof are also polynucleotides of the invention. Percent sequence identity can be calculated as described in the “Polypeptides” section. Degenerate nucleotide sequences are polynucleotides that encode a polypeptide of the invention or fragments thereof, but differ in nucleic acid sequence from the wild-type polynucleotide sequence, due to the degeneracy of the genetic code. Complementary DNA (cDNA) molecules, species homologs, and variants of polynucleotides that encode biologically functional polypeptides of the invention also are polynucleotides of the invention. Polynucleotides of the invention can be isolated from nucleic acid sequences present in, for example, a biological sample, such as blood, serum, saliva, or tissue from an individual patient. Polynucleotides can also he synthesized in the laboratory, for example, using an automatic synthesizer. An amplification method such as PCR can be used to amplify polynucleotides from either genomic DNA or cDNA encoding the polypeptides.

[0092] Polynucleotides of the invention can comprise coding sequences for naturally occurring polypeptides or can encode altered sequences that do not occur in nature. If desired, polynucleotides can be cloned into an expression vector comprising expression control elements, including for example, origins of replication, promoters, enhancers, or other regulatory elements that drive expression of the polynucleotides of the invention in host cells. An expression vector can be, for example, a plasmid, such as pBR322, pUC, or ColE1, or an adenovirus vector, such as an adenovirus Type 2 vector or Type 5 vector. Optionally, other vectors can be used, including but not limited to Sindbis virus, simian virus 40, alphavirus vectors, poxvirus vectors, and cytomegalovirus and retroviral vectors, such as murine sarcoma virus, mouse mammary tumor virus, Moloney murine leukemia virus, and Rous sarcoma virus. Minichromosomes such as MC and MC1, bacteriophages, phagemids, yeast artificial chromosomes, bacterial artificial chromosomes, virus particles, virus-like particles, cosmids (plasmids into which phage lambda cos sites have been inserted) and replicons (genetic elements that are capable of replication under their own control in a cell) can also be used.

[0093] Methods for preparing polynucleotides operably linked to an expression control sequence and expressing them in a host cell are well-known in the art. See, e.g., U.S. Pat. No. 4,366,246. A polynucleotide of the invention is operably linked when it is positioned adjacent to or close to one or more expression control elements, which direct transcription and/or translation of the polynucleotide.

[0094] Polynucleotides of the invention can be used, for example, as probes or primers, for example PCR primers, to detect the presence of polynucleotides in a sample, such as a biological sample. The ability of such probes and primers to specifically hybridize to polynucleotides of the invention will enable them to be of use in detecting the presence of complementary sequences in a given sample. Polynucleotide probes and primers of the invention can hybridize to complementary sequences in a sample such as a biological sample, including saliva, sputum, blood, urine, feces, cerebrospinal fluid, amniotic fluid, wound exudate, or tissue. Polynucleotides from the sample can be, for example, subjected to gel electrophoresis or other size separation techniques or can be immobilized without size separation. The polynucleotide probes or primers can be labeled. Suitable labels and methods for labeling probes and primers are known in the art, and include, for example, radioactive labels incorporated by nick translation or by kinase, biotin labels, fluorescent labels, chemiluminescent labels, bioluminescent labels, metal chelator labels and enzyme labels. Polynucleotides from a sample are contacted with the probes or primers under hybridization conditions of suitable stringencies.

[0095] Depending on the application, varying conditions of hybridization can be used to achieve varying degrees of selectivity of the probe or primer towards the target sequence. For applications requiring high selectivity, relatively stringent conditions can be used, such as low salt and/or high temperature conditions, such as provided by a salt concentration of from about 0.02 M to about 0.15 M salt, or any value or range between about 0.02M to about 0.15 M salt, at temperatures of from about 50° C. to about 70° C., or any value or range between about 50° C. to about 70° C. For applications requiring less selectivity, less stringent hybridization conditions can be used. For example, salt conditions from about 0.14 M to about 0.9M salt or any value or range between about 0.14 M to about 0.9M salt, at temperatures ranging from about 20° C. to about 55° C. or any value or range between about 20° C. to about 55° C. The presence of a hybridized complex comprising the probe or primer and a complementary polynucleotide from the test sample can indicate the presence of cancer in the sample.

### Antibodies

[0096] Antibodies of the invention are antibody molecules that specifically and stably bind to a polypeptide of the invention or fragment thereof. An antibody of the invention can be a polyclonal antibody, a monoclonal antibody, a single chain antibody (scFv), a monospecific single-chain antibody, a bispecific single-chain antibody, a bivalent single-chain antibody, a tetravalent single-chain antibody, a chimeric antibody, a humanized antibody, or an antigen-binding fragment of an antibody. Antigen-binding fragments of antibodies are a portion of an intact antibody comprising the antigen binding site or variable region of an intact antibody, wherein the portion is free of the constant heavy chain domains of the Fc region of the intact antibody. Examples of antigen-binding antibody fragments include Fab, Fab′, Fab′-SH, F(ab′)₂ and Fᵥ fragments.

[0097] An isolated antibody is substantially separated from its natural environment. For instance, an isolated antibody is substantially separated from the biological source from which it is derived. A purified antibody is substantially free of other material that associates with the antibody in its natural environment. For instance, a purified antibody is substantially free of cellular material or other proteins or antibodies from the cell or tissue from which it is derived. The term refers to preparations where the isolated antibody is at least about 70% to 80% (w/w) pure, more preferably, at least about 80%-90% (w/w) pure, even more preferably about 90-95% pure; and, most preferably at least about 95%, 96%, 97%, 98%, 99%, or 100% (w/w) pure.

[0098] An antibody of the invention can be any antibody class and any subtype, including for example, IgG (IgG1, IgG2, IgG4), IgM, IgA, IgD, IgE, and IgY. An antibody or antigen-binding fragment thereof binds to an epitope of a polypeptide of the invention. An antibody can be made in vivo in suitable laboratory animals or in vitro using recombinant DNA techniques. Means for preparing and characterizing antibodies are well know in the art. See, e.g., Dean, Methods Mol. Biol. 80:23-37 (1998); Dean, Methods. Mol. Biol. 32:361-79 (1994); Baileg, Methods Mol. Biol. 32:381-88 (1994); Gullick, Methods Mol. Biol. 32:389-99 (1994); Drenckhahn et al. Methods Cell. Biol. 37:7-56 (1993); Morrison, Ann. Rev. Immunol. 10:239-65 (1992); Wright et al. Crit. Rev. Immunol. 12:125-68 (1992). For example, polyclonal antibodies can be produced by administering a polypeptide of the invention to an animal, such as a human or other primate, mouse, rat, rabbit, guinea pig, goat, pig, dog, cow, sheep, donkey, chicken, or horse. Scrum from the immunized animal is collected and the antibodies are purified from the plasma by, for example, precipitation with ammonium sulfate, followed by chromatography, such as affinity chromatography. Techniques for producing and processing polyclonal antibodies are known in the art.

[0099] “Specifically binds” or “specific for” means that a first antigen, e.g., a polypeptide of the invention, recognizes and binds to an antibody of the invention with greater affinity than other, non-specific molecules. A non-specific molecule is an antigen that shares no common epitope with the first antigen. In this case, polypeptides of the invention would not generally be desirable choices for non-specific control molecules. For example, an antibody raised against a first antigen (e.g., a polypeptide) to which it binds more efficiently than to a non-specific antigen can be described as specifically binding to the first antigen. In a preferred embodiment, an antibody or antigen-binding portion thereof specifically binds to a polypeptide of the invention, such as SEQ ID NOs:1-157 or fragments thereof when it binds with a binding affinity Kₐ of 10⁷ l/mol or more. Specific binding can be tested using, for example, an enzyme-linked immunosorbant assay (ELISA), a radioimmunoassay (RIA), or a western blot assay using methodology well known in the art.

[0100] Additionally, monoclonal antibodies directed against epitopes present on a polypeptide of the invention can also be readily produced. For example, normal B cells from a mammal, such as a mouse, which was immunized with a polypeptide of the invention can be fused with, for example, HAT-sensitive mouse myeloma cells to produce hybridomas. Hybridomas producing antibodies can be identified using RIA or ELISA and isolated by cloning in semi-solid agar or by limiting dilution. Clones producing polypeptide-specific antibodies are isolated by another round of screening. Monoclonal antibodies can be screened for specificity using standard techniques, for example, by binding a polypeptide of the invention to a microtiter plate and measuring binding of the monoclonal antibody by an ELISA assay. Techniques for producing and processing monoclonal antibodies are known in the art. See e.g., Kohler & Milstein, Nature, 256:495 (1975). Particular isotypes of a monoclonal antibody can be prepared directly, by selecting from the initial fusion, or prepared secondarily, from a parental hybridoma secreting a monoclonal antibody of a different isotype by using a sib selection technique to isolate class-switch variants. See Steplewski et al., P.N.A.S. U.S.A. 82:8653 1985; Spria et al., J. Immunolog. Meth. 74:307, 1984. Monoclonal antibodies of the invention can also be recombinant monoclonal antibodies. See, e.g., U.S. Pat. No. 4,474,893; U.S. Pat. No. 4,816,567. Antibodies of the invention can also be chemically constructed. See, e.g., U.S. Pat. No. 4,676,980.

[0101] Antibodies of the invention can be chimeric (see, e.g., U.S. Pat. No. 5,482,856), humanized (see, e.g., Jones et al., Nature 321:522 (1986); Reichmann et al., Nature 332:323 (1988); Presta, Curr. Op. Struct. Biol. 2:593 (1992)), or human antibodies. Human antibodies can be made by, for example, direct immortilization, phage display, transgenic mice, or a Trimera methodology, see e.g., Reisener et al., Trends Biotechnol. 16:242-246 (1998).

[0102] Antibodies that specifically bind antigens (e.g., polypeptides of the invention), are particularly useful for detecting the presence of cancer-associated antigens in a sample, such as a serum, blood, urine, tissue, or saliva sample from an animal suspected of having cancer, such as a human. An immunoassay for cancer-associated antigens can utilize one antibody or several antibodies. An immunoassay for cancer-associated antigens can use, for example, a monoclonal antibody directed towards one epitope of a polypeptide of the invention, a combination of monoclonal antibodies directed towards epitopes of one polypeptide of the invention, monoclonal antibodies directed towards epitopes of different polypeptides of the invention, polyclonal antibodies directed towards the same antigen from a polypeptide of the invention, polyclonal antibodies directed towards different antigens, or a combination of monoclonal and polyclonal antibodies. Immunoassay protocols can be based upon, for example, competition, direct reaction, or sandwich type assays using, for example, labeled antibody. Antibodies of the invention can be labeled with any type of label known in the art, including, for example, fluorescent, chemiluminescent, radioactive, enzyme, colloidal metal, radioisotope and bioluminescent labels.

[0103] Antibodies of the invention include antibodies and antigen-binding fragments thereof that (a) compete with a reference antibody for binding to polypeptides of the invention, such as SEQ ID NOs:1-157 or antigen binding fragments thereof; (b) binds to the same epitope of polypeptides of the invention, such as SEQ ID NOs:1-157 or antigen binding fragments thereof as a reference antibody; (c) binds to polypeptides of the invention, such as SEQ ID NOs:1-157 or antigen binding fragments thereof with substantially the same K_{d} as a reference antibody; and/or (d) binds to polypeptides of the invention such as SEQ ID NOs:1-157 or fragments thereof with substantially the same off rate as a reference antibody, wherein the reference antibody is an antibody or antigen-binding fragment thereof that specifically binds to a polypeptide of the invention, such as SEQ ID NOs:1-157 or antigen-binding fragments thereof with a binding affinity Kₐ of 10⁷ l/mol or more.

[0104] Antibodies of the invention or antigen-binding fragments thereof can be bound to a support and used to detect the presence of cancer-associated antigens. Supports include, for example, glass, polystyrene, polypropylene, polyethylene, dextran, nylon, amylases, natural and modified celluloses, polyacrylamides, agaroses and magletite.

[0105] Antibodies of the invention can further be used to isolate cancer-associated antigens by immunoaffinity columns. The antibodies can be affixed to a solid support by, for example, adsorbtion or by covalent linkage so that the antibodies retain their immunoselective activity. Optionally, spacer groups can be included so that the antigen binding site of the antibody remains accessible. The immobilized antibodies can then be used to bind cancer-associated antigens from a sample, such as a biological sample including saliva, serum, sputum, blood, urine, feces, cerebrospinal fluid, amniotic fluid, wound exudate, or tissue. The bound cancer-associated antigens are recovered from the column matrix by, for example, a change in pH.

[0106] Antibodies of the invention can also be used in immunolocalization studies to analyze the presence and distribution of a polypeptide of the invention during various cellular events or physiological conditions. Antibodies can also be used to identify molecules involved in passive immunization and to identify molecules involved in the biosynthesis of non-protein antigens. Identification of such molecules can be useful in vaccine development. Antibodies of the invention, including, for example, monoclonal antibodies and single chain antibodies, can be used to monitor the course of amelioration of a cancer. Stage IV polynucleotide of the invention (i.e., polynucleotides that encode SEQ ID NOs:65-107) are particularly useful in this method, however, Stage I (i.e., polynucleotides that encode SEQ ID NOs:1-64) and Stage II (i.e., polynucleotides that encode SEQ ID NOs:108-157) can be used in this method. By measuring the increase or decrease of antibodies to cancer-associated antigens in a test sample from an animal, it can be determined whether a particular therapeutic regiment aimed at ameliorating the cancer is effective. Antibodies can be detected and/or quantified using for example, direct binding assays such as RIA, ELISA, or western blot assays.

### Methods of Detection of Cancer

[0107] Methods of detecting cancer, a predisposition to developing cancer, or a susceptibility to developing cancer in a subject are provided herein. A predisposition to cancer means that a subject is susceptible to cancer, such as colorectal cancer, or is more likely to develop cancer than a normal individual or a normal population of individuals. A subject can be a mammal such as a human, non-human primate, mouse, rat, dog, cat, sheep, pig, horse, or cow. One hundred seven polypeptides that were specifically expressed (i.e., the polypeptides are expressed in cancerous tissues, but are not expressed or are expressed at low levels in healthy tissues) in colon cancer tissues were identified. These polypeptides are cancer-associated polypeptides and are encoded by cancer-associated polynucleotides. The stage I polypeptides and polynucleotides are especially useful for early diagnosis. An expression level of one or more of the cancer-associated polynucleotides that encode polypeptides of the invention can be determined in a biological sample from a subject, wherein an increase of the expression level of the cancer-associated polynucleotides compared to a normal control expression level of the polynucleotide indicates that the subject has cancer or is at risk of developing cancer. A comparison to a normal control expression level is not necessary since the polynucleotides of the invention are not expressed or are expressed at low levels in healthy cells and tissues.

[0108] In general, PCMAT can be applied to a wide variety of cancers. The cancer can be colon cancer (also known as, and referred to herein also as colorectal or large bowel cancer), adenocarcinoma, carcinoma, sarcoma, lymphoma, leukemia, prostrate cancer, gastric cancer, lung cancer, bladder cancer, melanoma, pancreatic cancer, breast cancer, endometrial cancer, ovarian cancer, anal cancer, skin cancer, osteosarcoma, brain tumor, gastrointestinal cancer, esophageal cancer, bile duct cancer, eye cancer, gall bladder cancer, glioma, head and neck cancer, liver cancer, kidney cancer, laryngeal cancer, lip and oral cancer, mesothelioma, small intestinal cancer, testicular cancer, thyroid cancer, urethral cancer, uterine cancer, vaginal cancer, vulvar cancer, penile cancer, or any combination or subset thereof. The biological sample can be, for example, mucosal cells, tumor cells, cancer cells, a biopsy sample, a lavage sample, a sputum sample, a serum sample, a gastric secretion sample, a plasma sample, a blood sample, a fecal sample, a lymph node sample, a bone marrow sample, a urine sample, a tissue sample, a colorectal tissue sample, a pleural effusion sample, cells, cell extracts, bodily fluid, bodily fluids that are substantially lacking cells (e.g., less than about 1, 5, or 10% cells, tears, milk, seminal fluid, prostatic fluid, lung lavage fluid, or saliva.

[0109] The expression level of cancer-associated protein or polypeptide can be determined by detecting the polypeptide encoded by the cancer-associated polynucleotide. The level of the polypeptide expression can be detected using an immunoassay such as an ELISA, an immunohistochemical assay, an immunocytochemical assay, and a flow cytometry assay of antibody-labeled cells. The level of the polypeptide expression can be detected by, e.g., using an antibody that specifically binds to the polypeptide. The expression level of cancer-associated proteins and polypeptides can also be determined by detecting the biological activity of the polypeptides encoded by the cancer-associated polynucleotides. Methods of detecting the biological activity of polypeptides are well known in the art.

[0110] The expression level of a polynucleotide of the invention (i.e., “cancer-associated polynucleotide”) can be determined by detecting mRNA expression levels of the cancer-associated polynucleotide. The expression level of a cancer-associated polynucleotide can be determined by detecting hybridization of a cancer-associated polynucleotide probe to a polynucleotide transcript of a patient-derived biological sample. Hybridization can be detected using, for example a polynucleotide array. For example, probes for detecting RNA sequences corresponding to the cancer-associated polynucleotides of the invention can be used in, e.g., northern blot hybridization assays. Alternatively, polynucleotides of the invention can be used to construct primers that specifically amplify polynucleotide sequences in, e.g., amplification-based detection methods such as reverse-transcription based polymerase chain reaction (RT-PCR), polymerase chain reaction amplification (PCR), ligase chain reaction amplification (LCR), strand displacement amplification (SDA), and nucleic acid sequence based amplification (NASBA).

[0111] The expression level of one or more of the cancer-associated polynucleotides of the invention in the test sample can be compared to expression levels of the cancer-associated polynucleotides in a control sample. The control sample can be, e.g., a cancerous sample or non-cancerous sample (e.g., healthy tissue, such as healthy colorectal tissue).

[0112] Where the control sample is non-cancerous, a similar protein or polynucleotide expression level in the test sample and control sample indicates the test sample is non-cancerous. A test sample can be compared to multiple control samples. Thus, a test sample can be compared to a second control sample that contains, e.g., cancerous cells, as well as a second control that contains, e.g., non-cancerous cells.

[0113] Proteins, polypeptides and polynucleotides of the invention can be used to test a putative therapeutic or prophylactic anti-cancer agent, such as an anti-colorectal cancer agent, in a test sample from a specific subject to determine if the agent is a suitable anti-cancer agent in the specific subject. To identify an anti-cancer agent that is appropriate for a specific subject, a test sample, such as a cancerous cell or tumor sample is obtained from the subject and is exposed to the anti-cancer agent. The expression of one or more of polynucleotides of the invention is determined. The pattern of cancer-associated polynucleotide expression of the test sample can be measured and compared to one or more control profiles, e.g. a colorectal cancer reference expression profile or a non-colorectal cancer reference expression profile. Preferably, the cell population is contacted ex vivo with the agent or activated form of the anti-cancer agent.

[0114] Expression of the cancer-associated polypeptide or polynucleotides in the test sample is then compared to the expression of the cancer-associated polypeptide or polynucleotide in a control sample. The control sample can be cells whose cancer state is known. If the control sample is non-cancerous, a similar gene expression profile between the test sample and the control sample indicates the anti-cancer agent is suitable for treating cancer in the subject. A difference in expression between polypeptide or polynucleotide expression in the test sample and those in the control sample indicates that the anti-cancer agent is not suitable for treating cancer in the subject. A decrease in expression of one or more of the cancer-associated polypeptide or polynucleotides in a test sample relative to a control sample from cancerous tissues is indicative that the agent is therapeutic.

[0115] Polypeptides or polynucleotides of the invention can also be used to identify candidate therapeutic agents for treating a cancer, such as colorectal cancer. A candidate therapeutic agent is screened to determine if it converts an expression profile of cancer-associated polypeptide or polynucleotides characteristic of a cancer state, such as a colorectal cancer state, to a pattern indicative of a non-cancerous state.

[0116] A cancerous sample is exposed to a test agent or a combination of test agents (sequentially or simultaneously) and the expression of one or more cancer-associated polypeptide or polynucleotides in the sample is measured. The expression of the cancer-associated polypeptide or polynucleotides in the test sample is compared to expression level of the cancer-associated polypeptide or polynucleotides in a control sample that is not exposed to the test agent. Therapeutic test agents will decrease the expression of cancer-associated polypeptide or polynucleotides that are up-regulated in cancer cells.

[0117] The control sample can be cancerous cells, such as cancerous colorectal cancer cells. A decrease in expression of the cancer-associated polypeptide or polynucleotides in the presence of the test agent from the expression profile of the control sample in the absence of the test agent indicates the test agent is a candidate therapeutic agent for treating cancer, such as colorectal cancer.

[0118] Also provided is a method of assessing the prognosis of a subject with cancer, such as colorectal cancer, by comparing the expression of one or more polypeptide or polynucleotides of the invention in a test sample to the expression of the polypeptide or polynucleotides in a control sample derived from patients over a spectrum of disease stages. By comparing polypeptide or polynucleotide expression of one or more polypeptide or polynucleotides of the invention in the test sample and the control samples, or by comparing the pattern of polypeptide or polynucleotide expression over time in test samples derived from the subject, the prognosis of the subject can be assessed. The expression of one or more stage IV polypeptide or polynucleotides (i.e., polypeptide or polynucleotides that encode SEQ ID NOs:65-107) would be indicative of poorer prognosis. The expression of one or more stage I polypeptide or polynucleotides (i.e., polypeptide or polynucleotides that encode SEQ ID NOs:1-64) to the exclusion of expression of one or more stage IV polynucleotides would be indicative of a better prognosis.

[0119] The control sample can be a healthy sample or a cancerous sample, such as a colorectal cancer sample. Alternatively, the control sample is a cancer expression profile, such as a colorectal cancer expression profile. When the control sample is cancerous an increase of expression of one or more of the polypeptides of the invention, indicates less favorable prognosis. A decrease in expression of polypeptides or polypeptides of the invention indicates a more favorable prognosis for the subject. Alternatively, when a control sample is a healthy sample, an increase in expression of one or more or the polypeptides or polypeptides of the invention indicates a less favorable prognosis in the subject, while a decrease or similar expression indicates a more favorable prognosis.

[0120] The invention also provides a colorectal cancer reference expression profile comprising a pattern of polypeptide or polynucleotide expression levels of two or more of polypeptide or polynucleotides of the invention, optionally, over the course of the disease. The expression profile serves as a control for the diagnosis of colorectal cancer or predisposition for developing the disease, monitoring the course of treatment and assessing prognosis of a subject with the disease.

[0121] The invention also provides methods for predicting propensity for high-grade or low-grade metastatic spread of a cancer. The presence and/or level of a polypeptide or polynucleotide expression product in a cancerous sample can be detected and/or quantified and correlated to the propensity of the tumor to metastasize. The expression of one or more stage IV polypeptides or polynucleotides (i.e., polypeptides or polynucleotides that encode SEQ ID NOs:65-107) would be indicative of a higher grade metastatic spread of cancer. The expression of one or more stage I polynucleotides (i.e., polypeptides or polynucleotides that encode SEQ ID NOs:1-64) to the exclusion of expression of one or more stage IV polynucleotides would be indicative of a lower grade metastatic spread of cancer.

[0122] The polypeptides and polynucleotides of the invention can also be used to monitor the course of treatment of cancer, such as colorectal cancer. A test sample from a subject undergoing treatment for cancer, such as colorectal cancer is obtained. Test samples can be obtained from the subject at various time points before, during, or after treatment. Expression of one or more of the polypeptides or polynucleotides of the invention in the test sample is determined and compared to a control sample that includes cells having a known cancer state. Preferably, the control sample has not been exposed to the treatment. Stage IV polypeptides or polynucleotides of the invention (i.e., polypeptides of SEQ ID NOs:65-107 or polynucleotides that encode SEQ ID NOs:65-107) are particularly useful in this method, however, stage I (i.e., polypeptides of SEQ ID NOs:1-64 or polynucleotides that encode SEQ ID NOs:1-64) and stage II (i.e., polypeptides of SEQ ID NOs:108-157 or polynucleotides that encode SEQ ID NOs: 108-157) can be used in this method.

[0123] Where the control sample contains non-cancerous cells, a similarity in expression between polypeptides or polynucleotides of the invention in the test sample and the control sample indicates that the treatment is efficacious. However, an increase in expression of polypeptides or polynucleotides of the invention in the test sample as compared the control sample indicates the treatment is not efficacious.

[0124] Efficacious means that the treatment leads to a decrease in size, prevalence, or metastatic potential of cancer, such as colorectal cancer, in a subject. When treatment is applied prophylactically, efficacious means that the treatment retards, slows, or prevents cancer, such as colorectal cancer, from forming. Efficaciousness can be determined in association with any known method for diagnosing or treating cancer, such as colorectal cancer.

[0125] Where the control sample is cancerous, e.g., where the control sample includes cancer cells taken from the subject at the time of diagnosis, but prior to beginning treatment, a similarity in the expression pattern between the test sample and the control sample indicates the treatment is not efficacious. A difference in expression between polypeptide or polynucleotide expression in the test sample (i.e., a decrease in the test sample) and the control sample indicates the treatment is efficacious. Where the control sample contains non-cancerous cells, a decrease in expression of one or more of the polypeptide or polynucleotides of the invention in the test sample as compared to the control sample indicates that the treatment is efficacious.

### Methods of Treatment of Cancer

[0126] The invention provides methods for treating cancer, such as colorectal cancer, in a subject or stimulating an immune response in a subject comprising, for example, (a) administering to the subject a pharmaceutically effective amount of a polypeptide of the invention; (b) administering to the subject a pharmaceutically effective amount of a polynucleotide that encodes a polypeptide of the invention; or (c) administering to the subject a pharmaceutically effective amount of an antibody or antigen-binding fragment thereof that specifically binds to a polypeptide of the invention.

[0127] The invention also provides methods for inducing anti-tumor immunity in a subject comprising, for example, contacting a polypeptide of the invention with antigen presenting cells, or introducing a polynucleotide encoding the polypeptide or a vector comprising the polynucleotide to antigen presenting cells, and then administering the antigen presenting cells to the subject.

[0128] Administration of a therapeutic agent can be prophylactic or therapeutic to a subject at risk of (or susceptible to) a disorder or having a disorder associated with the differentially expressed polynucleotides of the invention. The expression, function, or both, of one or more expression products of the polynucleotides of the invention can be decreased in order to prophylactically or therapeutically treat a subject. Expression can be inhibited or decreased by administering to the subject a polynucleotide, such as an antisense molecule or siRNA molecule that inhibits or decreases the expression of the polynucleotides of the invention.

[0129] Antisense molecules and siRNA that correspond to polynucleotides of the invention are useful for the treatment of cancer, such as colorectal cancer. Antisense molecules and siRNA molecules can be entirely complementary to the target sequence or can have a mismatch of one or more nucleotides, so long as the antisense molecules and siRNA molecules can specifically hybridize to the target sequences. For example, the antisense molecules or siRNA molecules include polynucleotides that have a homology to a polynucleotide of the invention or its complement, of at least 80% or higher, more preferably 90% or higher, even more preferably 95% or higher over a span of at least 15 continuous nucleotides. Algorithms known in the art can be used to determine the homology.

[0130] Antisense molecules, siRNA molecules and polynucleotides of the invention can be delivered to a subject by standard vectors and/or gene delivery systems. Suitable gene delivery systems include liposomes, receptor-mediated delivery systems, naked DNA, and viral vectors such as herpes viruses, retroviruses, adenoviruses and adeno-associated viruses, among others.

[0131] Antisense molecules or siRNA molecules inhibit the expression of a polynucleotide of the invention and is thereby useful for suppressing the biological activity of a polypeptide of the invention. Therefore, a composition comprising an antisense molecule or siRNA molecule targeted to a polynucleotide of the invention is useful in treating a cancer, such as colorectal cancer.

[0132] In another embodiment of the invention, the function of one or more expression products of the polynucleotides of the invention can be inhibited by administering a compound that binds to or otherwise inhibits the function of the expression products. The compound can be, e.g., an antibody that specifically binds to an expression product of the polynucleotides of the invention.

[0133] Therapeutic compounds that may be utilized include, e.g., (i) a polypeptide or fragments thereof of SEQ ID NOs:1-157; (ii) antibodies or specific binding fragments thereof that specifically bind SEQ ID NOs:1-157; (iii) polynucleotides or fragments thereof that encode SEQ ID NOs:1-157; (iv) antisense molecules specific for polynucleotides (or complements thereof) that encode SEQ ID NOs:1-157 or fragments thereof; (v) siRNA molecules specific for polynucleotides (or complements thereof) that encode SEQ ID NOs:1-157 or fragments thereof; and (vi) modulators (i.e., inhibitors, agonists and antagonists that alter the interaction between a polypeptide of the invention and its binding partner).

[0134] Administration of a prophylactic pharmaceutical composition can occur prior to the manifestation of symptoms characteristic of a disease or disorder, such that a disease or disorder is prevented or, alternatively, delayed in its progression.

[0135] The present invention also relates to a method of treating or preventing cancer, such as colorectal cancer, in a subject comprising administering to said subject an immunological composition (i.e., a composition that can induce antibodies or other immune responses in a subject) comprising a polypeptide encoded by a polynucleotide of the invention or an immunologically active fragment of said polypeptide, or a polynucleotide encoding the polypeptide or the fragment thereof. Administration of the polypeptide can induce an anti-tumor immunity in a subject. In one embodiment the polypeptides of the invention or fragments thereof may be administered in a form bound to a T cell receptor (TCR) or presented by an antigen presenting cell (APC), such as macrophage, dendritic cell (DC), or B-cell.

[0136] In the present invention, an immunological composition against cancer, such as colorectal cancer, can function to induce anti-tumor immunity upon inoculation into a subject. Polypeptides of the invention may induce potent and specific immune response against cancer, such as colorectal cancer. In general, anti-tumor immunity includes immune responses such as induction of cytotoxic lymphocytes against tumors, induction of antibodies that recognize tumors, and induction of anti-tumor cytokine production.

[0137] Anti-tumor immunity is induced by administering the immunological composition of this invention, and the induction of anti-tumor immunity enables treatment and prevention of cancer, such as colorectal cancer.

[0138] A polypeptide of the invention that has immunological activity or a vector encoding the polypeptide may be combined with an adjuvant. An adjuvant can enhance the immune response against the polypeptide when administered together (or successively) with the polypeptide having immunological activity. The immunological composition is administered systemically or locally. Immunological composition administration may be performed by single administration, or boosted by multiple administrations.

[0139] In another aspect the invention includes pharmaceutical, or therapeutic, compositions containing one or more therapeutic compounds described herein. Pharmaceutical formulations may include those suitable for oral, rectal, nasal, topical (including buccal and sub-lingual), vaginal or parenteral (including intramuscular, intraperitoneal, intratumor, sub-cutaneous and intravenous) administration, or for administration by inhalation or insufflation. The formulations may, where appropriate, be conveniently presented in discrete dosage units and may be prepared by any of the methods well known in the art of pharmacy. All such pharmacy methods include the steps of bringing into association the active compound with liquid carriers or finely divided solid carriers or both as needed and then, if necessary, shaping the product into the desired formulation.

[0140] Pharmaceutical formulations suitable for oral administration may conveniently be presented as discrete units, such as capsules, cachets or tablets, each containing a predetermined amount of the active ingredient; as a powder or granules; or as a solution, a suspension or as an emulsion. The tablets or capsules may optionally be formulated so as to provide slow or controlled release of the active ingredient therein. The active ingredient may also be presented as a bolus electuary or paste, and be in a pure form, i.e., without a carrier. Oral fluid preparations may be in the form of, for example, aqueous or oily suspensions, solutions, emulsions, syrups or elixirs, or may be presented as a dry product for constitution with water or other suitable vehicle before use. Such liquid preparations may contain conventional additives such as suspending agents, emulsifying agents, non-aqueous vehicles (which may include edible oils), or preservatives.

[0141] Formulations for parenteral administration include aqueous and non-aqueous sterile injection solutions which may contain anti-oxidants, buffers, bacteriostats and solutes which render the formulation isotonic with the blood of the intended recipient; and aqueous and non-aqueous sterile suspensions which may include suspending agents and thickening agents. The formulations may be presented in unit dose or multi-dose containers, for example sealed ampoules and vials, and may be stored in a freeze-dried (lyophilized) condition requiring only the addition of the sterile liquid carrier, for example, saline, water-for-injection, immediately prior to use. Alternatively, the formulations may be presented for continuous infusion. Extemporaneous injection solutions and suspensions may be prepared from sterile powders, granules and tablets of the kind previously described.

[0142] Formulations for rectal administration may be presented as a suppository with the usual carriers such as cocoa butter or polyethylene glycol. Formulations for topical administration in the mouth, for example buccally or sublingually, include lozenges, comprising the active ingredient in a flavored base such as sucrose and acacia or tragacanth, and pastilles comprising the active ingredient in a base such as gelatin and glycerin or sucrose and acacia. For intra-nasal administration the compounds of the invention may be used as a liquid spray or dispersible powder or in the form of drops. Drops may be formulated with an aqueous or non-aqueous base also comprising one or more dispersing agents, solubilizing agents or suspending agents. Liquid sprays are conveniently delivered from pressurized packs.

[0143] For administration by inhalation the compounds are conveniently delivered from an insufflator, nebulizer, pressurized packs or other convenient means of delivering an aerosol spray. Pressurized packs may comprise a suitable propellant such as dichlorodifluoromethane, trichlorofluoromethane, dichlorotetrafluoroethane, carbon dioxide or other suitable gas. In the case of a pressurized aerosol, the dosage unit may be determined by providing a valve to deliver a metered amount.

[0144] Alternatively, for administration by inhalation or insufflation, the compounds may take the form of a dry powder composition, for example a powder mix of the compound and a suitable powder base such as lactose or starch. The powder composition may be presented in unit dosage form, in for example, capsules, cartridges, gelatin or blister packs from which the powder may be administered with the aid of an inhalator or insufflators.

[0145] When desired, the above described formulations, adapted to give sustained release of the active ingredient, may be employed. The pharmaceutical compositions may also contain other active ingredients such as antimicrobial agents, immunosuppressants or preservatives.

[0146] For each of the aforementioned conditions, the compositions may be administered orally or via injection at a dose of from about 0.1 to about 250 mg/kg per day. The dose range for adult humans is generally from about 5 mg to about 17.5 g/day, preferably about 5 mg to about 10 g/day, and most preferably about 100 mg to about 3 g/day. Tablets or other unit dosage forms of presentation provided in discrete units may conveniently contain an amount which is effective at such dosage or as a multiple of the same, for instance, units containing about 5 mg to about 500 mg, usually from about 100 mg to about 500 mg. The dose employed will depend upon a number of factors, including the age and sex of the subject, the precise disorder being treated, and its severity. Also the route of administration may vary depending upon the condition and its severity.

### Methods for Screening Anti-Cancer Compounds

[0147] The invention provides methods for screening for anti-cancer compounds, e.g. anti-colorectal cancer compounds. For example, anti-cancer compounds can be identified by comparing the level of a polypeptide or polynucleotide expression product in a first biological sample (e.g., a cancerous sample) in the presence of a test compound to the level of the polypeptide or polynucleotide expression product in a second biological sample (e.g., a cancerous sample) in the absence of the test compound; wherein the polypeptide or polynucleotide expression product comprises, for example, a polypeptide selected from the group consisting of SEQ ID NOs:1-157 or mRNA encoding the polypeptide. A test compound that decreases the level of the polypeptide or polynucleotide expression product in the first biological sample as compared to the second biological sample is identified as an anti-cancer agent. In one embodiment of the invention, the test compound decreases the level of the polypeptide or polynucleotide expression product by at least about 10%, 20%, 30%, 40%, 50%, 60%, 70%, 80%, 90% (or any value or range between about 10% and about 90%) in the first biological sample as compared to the level of the expression product in the second biological sample.

[0148] In one embodiment of the invention, screening for anti-cancer compounds, e.g. anti-colorectal cancer compounds, can comprise comparing the level of biological activity of a polypeptide of the invention in a first biological sample in the presence of a test compound to the level of biological activity in a second biological sample in the absence of the test compound; wherein a test compound that decreases the level of biological activity in the first biological sample as compared to the second biological sample is identified as an anti-cancer agent.

[0149] In one embodiment of the invention, screening for anti-cancer compounds, e.g. anti-colorectal cancer compounds can comprise a) contacting a test compound with a polypeptide of the invention; b) detecting the binding activity between the polypeptide and the test compound; and c) selecting a compound that binds to the polypeptide.

[0150] In one embodiment of the invention, screening for anti-cancer compounds, e.g. anti-colorectal cancer compounds, can comprise a) contacting a candidate compound with a test cell expressing, one or more of the polypeptides of the invention; and b) selecting a compound that reduces the expression level of one or more polypeptides of the invention. The test cell can comprise a colorectal cancer cell.

[0151] In one embodiment of the invention, screening for anti-cancer compounds, e.g. anti-colorectal cancer compounds, can comprise a) contacting a candidate compound with a cell into which a vector comprising the transcriptional regulatory region of one or more marker genes and a reporter gene that is expressed under the control of the transcriptional regulatory region has been introduced, wherein the one or more marker genes are selected from the group consisting of polynucleotides that encode SEQ ID NOs:1-157) measuring the activity of the reporter gene; and c) selecting a compound that reduces the expression level of the reporter gene as compared to a control.

[0152] The invention provides kits for use, for example, in diagnostic methods. Components of the kits can include, for example, compounds, reagents, containers and/or equipment. For example, one container within a kit may contain a monoclonal antibody or antigen-binding fragment thereof that specifically binds to a polypeptide of the invention. The antibodies or antigen-binding fragments can be, e.g., attached to a support material. One or more additional containers can contain elements, such as reagents or buffers, to be used in an assay. The kits can also, or alternatively, contain a detection reagent that contains a reporter group suitable for direct or indirect detection of specific antibody binding.

[0153] Alternatively, a kit can be used to detect, e.g., the level of mRNA encoding a polypeptide of the invention in a biological sample. Such kits can comprise at least one, two, or more polynucleotide probes or primers, that hybridize to a polynucleotide (or the complement thereof) encoding a polypeptide of the invention. Such polynucleotides can be used, for example, within an amplification assay (e.g., RT-PCR) or hybridization assay. Additional components that can be present in such kits include a second polynucleotide and/or a diagnostic reagent or container to facilitate the detection of a polynucleotide encoding a polypeptide of the invention.

[0154] The invention illustratively described herein suitably can be practiced in the absence of any element or elements, limitation or limitations that are not specifically disclosed herein. Thus, for example, in each instance herein any of the terms “comprising”, “consisting essentially of”, and “consisting of” may be replaced with either of the other two terms, without changing the ordinary meanings of these terms. The terms and expressions which have been employed are used as terms of description and not of limitation, and there is no intention that in the use of such terms and expressions of excluding any equivalents of the features shown and described or portions thereof, but it is recognized that various modifications are possible within the scope of the invention claimed. Thus, it should be understood that although the present invention has been specifically disclosed by preferred embodiments, optional features, modification and variation of the concepts herein disclosed may be resorted to by those skilled in the art, and that such modifications and variations are considered to be within the scope of this invention as defined by the description and the appended claims.

[0155] In addition, where features or aspects of the invention are described in terms of Markush groups or other grouping of alternatives, those skilled in the art will recognize that the invention is also thereby described in terms of any individual member or subgroup of members of the Markush group or other group.

[0156] All references cited in this disclosure are incorporated herein in their entirety by reference. Furthermore, the content (as of the filing date of this application) of all GenBank, ENSEMBL, UNIPARC, and UniProt Accession Numbers (and data associated therewith) listed herein are incorporated herein by reference in their entirety.

| Titin (also known as TTN rhabdomyosarcoma antigen MU-RMS 40) | |
|---|---|
| (e.g., GenBank Accession Number Q8WZ42-2 | |
| (SEQ ID NO: 1) | |
| 1 | mttqaptftq plqsvvvleg statfeahis gfpvpevswf rdgqvistst lpgvqisfsd |
| 61 | grakltipav tkansgrysl katngsgqat staellvkae tappnfvqrl qsmtvrqgsq |
| 121 | vrlqvrvtgi ptpvvkfyrd gaeiqssldf qisqegdlys lliaeayped sgtysvnatn |
| 181 | svgratstae llvqgeeevp akktktivst aqisesrqtr iekkieahfd arsiatvemv |
| 241 | idgaagqqlp hktphrippk pksrsptpps iaakaqlarq qspspirhsp spvrhvrapt |
| 301 | pspvrsvspa aristspirs vrspllmrkt qastvatgpe vpppwkqegy vassseaemr |
| 361 | ettlttstqi rteerwegry gvqeqvtisg aagaaasvsa sasyaaeava tgakevkqda |
| 421 | dksaavatvv aavdmarvre pvisaveqta qrttttavhi qpaqeqvrke aektavtkvv |
| 481 | vaadkakeqe lksrtkevit tkqeqmhvth eqirketekt fvpkvvisaa kakeqetris |
| 541 | eeitkkqkqv tqeairqete itaasmvvva takstkletv pgaqeetttq qdqmhlsyek |
| 601 | imketrktvv pkvivatpkv keqdlvsrgr egittkreqv qitqekmrke aektalstia |
| 661 | vatakakeqe tilrtretma trqeqiqvth gkvdvgkkae avatvvaavd qarvreprep |
| 721 | ghleesyaqq ttleygyker isaakvaepp qrpasephvv pkavkprviq apsethiktt |
| 781 | dqkgmhissq ikkttdltte rlvhvdkrpr tasphftvsk isvpktehgy easiagsaia |
| 841 | tlqkelsats saqkitksvk aptvkpsetr vraeptplpq fpfadtpdty kseagvevkk |
| 901 | evgvsitgtt vreerfevlh greakvteta rvpapveipv tpptlvsglk nvtviegesv |
| 961 | tlechisgyp sptvtwyred yqiessidfq itfqsgiarl mireafaeds grftcsavne |
| 1021 | agtvstscyl avqvseefek ettavtekft teekrfvesr dvvmtdtslt eeqagpgepa |
| 1081 | apyfitkpvv qklveggsvv fgcqvggnpk phvywkksgv plttgyrykv synkqtgeck |
| 1141 | lvismtfadd ageytivvrn khgetsasas lleeadyell mksqqemlyq tqvtafvqep |
| 1201 | kvgetapgfv yseyekeyek eqalirkkma kdtvvvrtyv edqefhissf eerlikeiey |
| 1261 | riikttleel leedgeekma vdiseseave sgfdlrikny rilegmgvtf hckmsgyplp |
| 1321 | kiawykdgkr ikhgeryqmd flqdgraslr ipvvlpedeg iytafasnik gnaicsgkly |
| 1381 | vepaaplgap tyiptlepvs rirslsprsv srspirmspa rmsparmspa rmsparmspg |
| 1441 | rrleetdesq lerlykpvfv lkpvsfkcle gqtarfdlkv vgrpmpetfw fhdgqqivnd |
| 1501 | ythkvviked gtqsliivpa tpsdsgewtv vaqnragrss isviltveav ehqvkpmfve |
| l561 | klknvnikeg sqlemkvrat gnpnpdivwl knsdiivphk ypkiriegtk geaalkidst |
| 1621 | vsqdsawyta tainkagrdt trckvnveve faepeperkl iiprgtyrak eiaapelepl |
| 1681 | hlrygqeqwe egdlydkekq qkpffkkklt slrlkrfgpa hfecrltpig dptmvvewlh |
| l741 | dgkpleaanr lrminefgyc sldygvaysr dsgiitcrat nkygtdhtsa tlivkdeksl |
| 1801 | veesqlpegr kglqrieele rmahegaltg vttdqkekqk pdivlypepv rvlegetarf |
| 1861 | rcrvtgypqp kvnwylngql irkskrfrvr ydgihyldiv dcksydtgev kvtaenpegv |
| 1921 | iehkvkleiq qredfrsvlr rapeprpefh vhepgklqfe vqkvdrpvdt tetkevvklk |
| 1981 | raerithekv peeseelrsk fkrrteegyy eaitavelks rkkdesyeel lrktkdellh |
| 2041 | wtkelteeek kalaeegkit iptfkpdkie lspsmeapki feriqsqtvg qgsdahfrvr |
| 2101 | vvgkpdpece wykngvkier sdriywywpe dnvcelvird vtaedsasim vkainiaget |
| 2161 | sshafllvqa kqlitftqel qdvvakekdt matfecetse pfvkvkwykd gmevhegdky |
| 2221 | rmhsdrkvhf lsiltidtsd aedyscvlve denvkttakl ivegavvefv kelqdievpe |
| 2281 | sysgeleciv speniegkwy hndvelksng kytitsrrgr qnltvkdvtk edqgeysfvi |
| 2341 | dgkkttcklk mkprpiailq glsdqkvceg divqlevkvs lesvegvwmk dgqevqpsdr |
| 2401 | vhividkqsh mlliedmtke dagnysftip alglstsgrv svysvdvitp lkdvnviegt |
| 2461 | kavleckvsv pdvtsvkwyl ndeqikpddr vqaivkgtkq rlvinrthas degpyklivg |
| 2521 | rvetncnlsv ekikiirglr dltctetqnv vfevelshsg idvlwnfkdk eikpsskyki |
| 2581 | eahgkiyklt vlnmmkddeg kytfyageni tsgkltvagg aiskpltdqt vaesqeavfe |
| 2641 | cevanpdskg ewlrdgkhlp ltnnirsesd ghkrrliiaa tklddigeyt ykvatsktsa |
| 2701 | klkveavkik ktlknltvte tqdavftvel thpnvkgvqw ikngvvlesn ekyaisvkgt |
| 2761 | iyslriknca ivdesvygfr lgrlgasarl hvetvkiikk pkdvtalena tvafevsvsh |
| 2821 | dtvpvkwfhk nveikpsdkh rlvserkvhk lmlqnispsd ageytavvgq leckaklfve |
| 2881 | tlhitktmkn ievpetktas fecevshfnv psmwlkngve iemsekfkiv vqgklhqlii |
| 2941 | mntstedsae ytfvcgndqv satltvtpim itsmlkdina eekdtitfev tvnyegisyk |
| 3001 | wlkngveiks tdkcqmrtkk lthslnirnv hfgdaadytf vagkatstat lyvearhief |
| 3061 | rkhikdikvl ekkramfece vsepditvqw mkddqelqit drikiqkeky vhrllipstr |
| 3121 | msdagkytvv aggnvstakl fvegrdvrir sikkevqvie kqravvefev neddvdahwy |
| 3181 | kdgieinfqv qerhkyvver rihrmfiset rqsdageytf vagrnrssvt lyvnapeppq |
| 3241 | vlqelqpvtv qsgkparfca visgrpqpki swykeeqlls tgfkckflhd ggeytlllie |
| 3301 | afpedaavyt ceakndygva ttsaslsvev pevvspdqem pvyppaiitp lqdtvtsegq |
| 3361 | parfqcrvsg tdlkvswysk dkkikpsrff rmtqfedtyq leiaeayped egtytfvasn |
| 3421 | avgqvsstan lsleapesil herieqeiem emkefsssfl saeeeglhsa elqlskinet |
| 3481 | lellsespvy stkfdsekeg tgpifikevs nadismgdva tlsvtvigip kpkiqwffng |
| 3541 | vlltpsadyk fvfdgddhsl iilftklede geytcmasnd ygkticsayl kinskgeghk |
| 3601 | dtetesavak sleklggpcp phflkelkpi rcaqglpaif eytvvgepap tvtwfkenkq |
| 3661 | lctsvyytii hnpngsgtfi vndpqredsg lyickaenml gestcaaell vlledtdmtd |
| 3721 | tpckakstpe apedfpqtpl kgpavealds eqeiatfvkd tilkaalite enqqlsyehi |
| 3781 | akanelssql plgaqelqsi leqdkltpes treflcings ihfqplkeps pnlqlqivqs |
| 3841 | qktfskegil mpeepetqav lsdtekifps amsieqinsl tveplktlla epegnypqss |
| 3901 | ieppmhsylt svaeevlspk ektvsdtnre qrvtlqkqea qsalilsqsl aeghveslqs |
| 3961 | pdvmisqvny eplvpsehsc teggkilies anplenagqd savrieegks lrfplaleek |
| 4021 | qvllkeehsd nvvmppdqii eskrepvaik kvqevqgrdl lskesllsgi peeqrlnlki |
| 4081 | qicralqaav aseqpglfse wlrniekvev eavnitqepr himcmylvts aksvteevti |
| 4141 | iiedvdpqma nlkmelrdal caiiyeeidi ltaegpriqq gaktslqeem dsfsgsqkve |
| 4201 | pitepevesk ylisteevsy fnvqsrvkyl datpvtkgva savvsdekqd eslkpseeke |
| 4261 | esssesgtee vatvkigeae gglikedgpm ihtplvdtvs eegdivhltt sitnakevnw |
| 4321 | yfenklvpsd ekfkclqdqn tytlvidkvn tedhqgeyvc ealndsgkta tsakltvvkr |
| 4381 | aapvikrkie plevalghla kftceiqsap nvrfqwfkag reiyesdkcs irsskyissl |
| 4441 | eilrtqvvdc geytckasne ygsysctatl tvteaypptf lsrpkslttf vgkaakfict |
| 4501 | vtgtpvieti wqkdgaalsp spnwkisdae nkhilelsnl tiqdrgvysc kasnkfgadi |
| 4561 | cqaeliiidk phfikelepv qsainkkvhl ecqvdedrkv tvtwskdgqk lppgkdykic |
| 4621 | fedkiatlei plaklkdsgt yvctasneag ssscsatvtv reppsfvkkv dpsylmlpge |
| 4681 | sarlhcklkg spviqvtwfk nnkelsesnt vrmyfvnsea ilditdvkve dsgsysceav |
| 4741 | ndvgsdscst eivikeppsf iktlepadiv rgtnallqce vsgtgpfeis wfkdkkqirs |
| 4801 | skkyrlfsqk slvcleifsf nsadvgeyec vvanevgkcg cmathllkep ptfvkkvddl |
| 4861 | ialggqtvtl qaavrgsepi svtwmkgqev iredgkikms fsngvavlii pdvqisfggk |
| 4921 | ytclaeneag sqtsvgeliv kepakiiera eliqvtagdp atleytvagt pelkpkwykd |
| 4981 | grplvaskky risfknnvaq ikfysaelhd sgqytfeisn evgssscett ftvldrdiap |
| 5041 | fftkplrnvd svvngtcrld ckiagslpmr vswfkdgkei aasdryriaf vegtasleii |
| 5101 | rvdmndagnf tcratnsvgs kdssgativq eppsfvtkpg skdvlpgsav clkstfqgst |
| 5161 | pltirwfkgn kelvsggscy itkealessl elylvktsds gtytckvsnv aggvecsanl |
| 5221 | fvkepatfve klepsqllkk gdatqlackv tgtppikitw fandreikes skhrmsfves |
| 5281 | tavlrltdvg iedsgeymce aqneagsdhc ssivivkesp yftkefkpie vlkeydvmll |
| 5341 | aevagtppfe itwfkdntil rsgrkyktfi qdhlvslqil kfvaadagey qcrvtnevgs |
| 5401 | sicsarvtlr eppsfikkie stsslrggta afqatlkgsl pitvtwlkds deiteddnir |
| 5461 | mtfennvasl ylsgievkhd gkyvcqaknd agiqrcsall svkepatite eavsidvtqg |
| 5521 | dpatlqvkfs gtkeitakwf kdgqeltlgs kykisvtdtv silkiistek kdsgeytfev |
| 5581 | qndvgrssck arinvldlii ppsftkklkk mdsikgsfid lecivagshp isiqwfkddq |
| 5641 | eisasekykf sfhdntafle isqlegtdsg tytcsatnka ghnqcsghlt vkeppyfvek |
| 5701 | pqsqdvnpnt rvqlkalvgg tapmtikwfk dnkelhsgaa rsvwkddtst slelfaakat |
| 5761 | dsgtyicqls ndvgtatska tlfvkeppqf ikkpspvlvl rngqsttfec qitgtpkirv |
| 5821 | swyldgneit aiqkhgisfi dglatfqisg arvensgtyv cearndagta scsielkvke |
| 5881 | pptfirelkp vevvkysdve lecevtgtpp fevtwlknnr eirsskkytl tdrvsvfnlh |
| 5941 | itkcdpsdtg eyqcivsneg gscscstrva lkeppsfikk ientttvlks satfqstvag |
| 6001 | sppisitwlk ddqildeddn vyisfvdsva tlqirsvdng hsgrytcqak nesgvercya |
| 6061 | fllvqepaqi vekaksvdvt ekdpmtlecv vagtpelkvk wlkdgkqivp sryfsmsfen |
| 6121 | nvasfriqsv mkqdsgqytf kvendfgsss cdaylrvldq nippsftkkl tkmdkvlgss |
| 6181 | ihmeckvsgs lpisaqwfkd gkeistsaky rlvchersvs levnnleled tanytckvsn |
| 6241 | vagddacsgi ltvkeppsfl vkpgrqqaip dstvefkail kgtppfkikw fkddvelvsg |
| 6301 | pkcfiglegs tsflnlysvd asktgqytch vtndvgsdsc ttmllvtepp kfvkkleask |
| 6361 | ivkagdssrl eckiagspei rvvwfrnehe lpasdkyrmt fidsvaviqm nnlstedsgd |
| 6421 | ficeaqnpag stscstkviv keppvfssfp pivetlknae vslecelsgt ppfevvwykd |
| 6481 | krqlrsskky kiasknfhts ihilnvdtsd igeyhckaqn evgsdtcvct vklkepprfv |
| 6541 | sklnsltvva gepaelqasi egaqpifvqw lkekeevire seniritfve nvatlqfaka |
| 6601 | epanagkyic qikndggmee nmatlmvlep avivekagpm cvtvgetctl eckvagtpel |
| 6661 | svewykdgkl ltssqkhkfs fynkisslri lsverqdagt ytfqvqnnvg kssctavvdv |
| 6721 | sdravppsft rrlkntggvl gascileckv agsspisvaw fhektkivsg akyqttfsdn |
| 6781 | vctlqlnsld ssdmgnytcv aanvagsdec ravltvqepp sfvkepeple vlpgknvtft |
| 6841 | svirgtppfk vnwfrgarel vkgdrcniyf edtvaelelf nidisqsgey tcvvsnnagq |
| 6901 | ascttrlfvk epaaflkrls dhsvepgksi ilestytgtl pisvtwkkdg fnittsekcn |
| 6961 | ivttektcil eilnstkrda gqysceiene agrdvcgalv stleppyfvt elepieaavg |
| 7021 | dsyslqcqva gtpeitvswy kgdtklrptp eyrtyftnnv ativfnkvni ndsgeytcka |
| 7081 | ensigtassk tvfriqerql ppsfarqlkd ieqtvglpvt ltcrlngsap iqvcwyrdgv |
| 7141 | llrddenlqt sfvdnvatlk ilqtdlshsg qyscsasnpl gtasssarlt arepkkspff |
| 7201 | dikpvsidvi agesadfech vtgagpmrit wskdnkeirp ggnytitcvg ntphlrilkv |
| 7261 | gkgdsgqytc qatndvgkdm csaqlsvkep pkfvkkleas kvakqgesiq leckisgspe |
| 7321 | ikvswfrnds elheswkynm sfinsvallt ineasaedsg dyiceahngv gdascstalt |
| 7381 | vkappvftqk pspvgalkgs dvilqceisg tppfevvwvk drkqvrnskk fkitskhfdt |
| 7441 | slhilnleas dvgeyhckat nevgsdtcsc svkfkepprf vkklsdtstl igdavelrai |
| 7501 | vegfqpisvv wlkdrgevir esentrisfi dniatlqlgs peasnsgkyi cqikndagmr |
| 7561 | ecsavltvle pariiekpep mtvttgnpfa lecvvtgtpe isakwfkdgr elsadskhhi |
| 7621 | tfinkvaslk ipcaemsdkg lysfevknsv gksnctvsvh vsdrivppsf irklkdvnai |
| 7681 | lgasvvlecr vsgsapisvg wfqdgneivs gpkcqssfse nvctlnlsll epsdtgiytc |
| 7741 | vaanvagsde csavltvqep psfeqtpdsv evlpgmsltf tsvirgtppf kvkwfkgsre |
| 7801 | lvpgescnis ledfvtelel fevqplesgd ysclvtndag sasctthlfv kepatfvkrl |
| 7861 | adfsvetgsp ivleatytgt ppisyswikd eylisqserc sitmteksti leilestied |
| 7921 | yaqysclien eagqdiceal vsvleppyfi eplehveavi gepatlqckv dgtpeirisw |
| 7981 | ykehtklrsa paykmqfknn vaslvinkvd hsdvgeysck adnsvgavas savlvikerk |
| 8041 | lppffarklk dvhetlyfpv afecringse plqvswykdg vllkddanlq tsfvhnvatl |
| 8101 | gilqtdqshi gqyncsasnp lgtasssakl ilsehevppf fdlkpvsvdl algesgtfkc |
| 8161 | hvtgtapiki twakdnreir pggnykmtlv entatltvlk vgkgdagqyt cyasniagkd |
| 8221 | scsahlgvqe pprfikklep srivkqdeft ryeckiggsp eikvlwykde teiqesskfr |
| 8281 | msfvdsvavl emhnlsveds gdytceahna agsassstsl kvkeppifrk kphpietlkg |
| 8341 | advhlecelq gtppfhvswy kdkrelrsgk kykimsenfl tsihilnvda adigeyqcka |
| 8401 | tndvgsdtcv gsialkappr fvkklsdist vvgkevqlqt tiegaepisv vwfkdkgeiv |
| 8461 | resdniwisy seniatiqfs rvepanagky tcqikndagm qecfatlsvl epativekpe |
| 8521 | sikvttgdtc tlectvagtp elstkwfkdg keltsdnkyk isffnkvsgl kiinvapsds |
| 8581 | gvysfevqnp vgkdsctasl qvsdrtvpps ftrklketng lsgssvvmec kvygsppisv |
| 8641 | swfhegneis sgrkyqttlt dntcaltvnm leesdsgdyt ciatnmagsd ecsapltvre |
| 8701 | ppsfvqkpdp mdvltgtnvt ftsivkgtpp fsyswfkgss elvpgdrcnv sledsvaele |
| 8761 | ifdvdtsqsg eytcivsnea gkasctthly ikapakfvkr indysiekgk plilegtftg |
| 8821 | tppisvtwkk nginvtpsqr cnittteksa ileipsstve dagqyncyie nasgkdscsa |
| 8881 | qilileppyf vkqlepvkvs vgdsaslqcq lagtpeigvs wykydtklrp tttykmhfrn |
| 8941 | nvatlvfnqv dindsgeyic kaensvgevs astfltvqeq klppsfsrql rdvqetvglp |
| 9001 | vvfdcaisgs episvswykd gkplkdspnv qtsfldntat lnifktdrsl agqysctatn |
| 9061 | pigsasssar liltegknpp ffdirlapvd avvgesadfe chvtgtqpik vswakdsrei |
| 9121 | rsggkyqisy lensahltvl kvdkgdsgqy tcyavnevgk dsctaqlnik erlippsftk |
| 9181 | rlsetveete gnsfklegrv agsqpitvaw yknnieiqpt snceitfknn tlvlqvrkag |
| 9241 | mndaglytck vsndagsalc tssivikepk kppvfdqhlt pvtvsegeyv qlschvqgse |
| 9301 | piriqwlkag reikpsdrcs fsfasgtavl elrdvakads gdyvckasnv agsdttkskv |
| 9361 | tikdkpavap atkkaavdgr lffvsepqsi rvvekttatf iakvggdpip nvkwtkgkwr |
| 9421 | qlnqggrvfi hqkgdeakle irdttktdsg lyrcvafneh geiesnvnlq vderkkqeki |
| 9481 | egdlramlkk tpilkkgage eeeidimell knvdpkeyek yarmygitdf rgllqafell |
| 9541 | kqsqeeethr leieeierse rdekefeelv sfiqqrlsqt epvtlikdie nqtvlkdnda |
| 9601 | vfeidikiny peiklswykg teklepsdkf eisidgdrht lrvkncqlkd qgnyrlvcgp |
| 9661 | hiasakltvi epawerhlqd vtlkegqtct mtcqfsvpnv ksewfrngri lkpqgrhkte |
| 9721 | vehkvhklti advraedqgq ytckyedlet saelrieaep iqftkriqni vvsehqsatf |
| 9781 | ecevsfddai vtwykgptel tesqkynfrn dgrchymtih nvtpddegvy sviarleprg |
| 9841 | earstaelyl ttkeiklelk ppdipdsrvp iptmpiravp peeippvvap piplllptpe |
| 9901 | ekkpppkrie vtkkavkkda kkvvakpkem tpreeivkkp pppttlipak apeiidvssk |
| 9961 | aeevkimtit rkkevqkeke avyekkqavh kekrvfiesf eepydeleve pytepfeqpy |
| 10021 | yeepdedyee ikveakkevh eeweedfeeg qeyyereegy degeeeweea yqereviqvq |
| 10081 | kevyeesher kvpakvpekk appppkvikk pviekiekts rrmeeekvqv tkvpevskki |
| 10141 | vpqkpsrtpv qeevievkvp avhtkkmvis eekmffasht eeevsvtvpe vqkeivteek |
| 10201 | ihvavskrve pppkvpelpe kpapeevapv pipkkveppa pkvpevpkkp vpeekkpvpv |
| 10261 | pkkepaappk vpevpkkpvp eekipvpvak kkeappakvp evqkrvvtee kitivtqree |
| 10321 | spppavpeip kkkvpeerkp vprkeeevpp ppkvpalpkk pvpeekvavp vpvakkappp |
| 10381 | raevskktvv eekrfvaeek lsfavpqrve vtrhevsaee ewsyseeeeg vsisvyreee |
| 10441 | reeeeeaevt eyevmeepee yvveeklhii skrveaepae vterqekkiv lkpkipakie |
| 10501 | epppakvpea pkkivpekkv papvpkkekv pppkvpeepk kpvpekkvpp kvikmeeplp |
| 10561 | akvterhmqi tqeekvlvav tkkeappkar vpeepkravp eekvlklkpk reeeppakvt |
| 10621 | efrkrvvkee kvsieapkre pqpikevtim eekeraytle eeavsvqree eyeeyeeydy |
| 10681 | kefeeyepte eydqyeeyee reyeryeehe eyitepekpi pvkpvpeepv ptkpkappak |
| 10741 | vlkkavpeek vpvpipkklk ppppkvpeep kkvfeekiri sitkrekeqv tepaakvpmk |
| 10801 | pkrvvaeekv pvprkevapp vrvpevpkel epeevafeee vvthveeylv eeeeeyihee |
| 10861 | eefiteeevv pvipvkvpev prkpvpeekk pvpvpkkkea ppakvpevpk kpeekvpvli |
| 10921 | pkkekpppak vpevpkkpvp eekvpvpvpk kveappakvp evpkkpvpek kvpvpapkkv |
| 10981 | eappakvpev pkklipeekk ptpvpkkvea pppkvpkkre pvpvpvalpq eeevlfeeei |
| 11041 | vpeeevlpee eevlpeeeev lpeeeevlpe eeeippeeee vppeeeyvpe eeefvpeeev |
| 11101 | lpevkpkvpv papvpeikkk vtekkvvipk keeappakvp evpkkveekr iilpkeeevl |
| 11161 | pvevteepee episeeeipe eppsieevee vapprvpevi kkavpeaptp vpkkveappa |
| 11221 | kvskkipeek vpvpvqkkea ppakvpevpk kvpekkvlvp kkeavppakg rtvleekvsv |
| 11281 | afrqevvvke rlelevveae veeipeeeef heveeyfeeg efheveefik leqhrveeeh |
| 11341 | rvekvhrvie vfeaeevevf ekpkappkgp eisekiippk kpptkvvprk eppakvpevp |
| 11401 | kkivveekvr vpeeprvppt kvpdvlppke vvpekkvpvp pakkpeappp kvpeapkevv |
| 11461 | pekkvpvppp kkpevpptkv pevpkaavpe kkvpeaippk pespppevpe apkevvpekk |
| 11521 | vpaappkkpe vtpvkvpeap kevvpekkvp vpppkkpevp ptkvpevpkv avpekkvpea |
| 11581 | ippkpesppp evfeapeeva leeppaevve epepaappqv tvppkkpvpe kkapavvakk |
| 11641 | pelppvkvpe vpkevvpekk vplvvpkkpe appakvpevp kevvpekkva vpkkpevppa |
| 11701 | kvpevpkkpv leekpavpvp eraespppev yeepeeiape eeiapeeekp vpvaeeeepe |
| 11761 | vpppavpeep kkiipekkvp vikkpeappp kepepekvie kpklkprppp pppappkedv |
| 11821 | kekifqlkai pkkkvpekpq vpekveltpl kvpggekkvr kllperkpep keevvlksvl |
| 11881 | rkrpeeeepk vepkklekvk kpavpepppp kpveevevpt vtkrerkipe ptkvpeikpa |
| 11941 | iplpapepkp kpeaevktik pppvepeptp iaapvtvpvv gkkaeakapk eeaakpkgpi |
| 12001 | kgvpkktpsp ieaerrklrp gsggekppde apftyqlkav plkfvkeikd iiltesefvg |
| 12061 | ssaifeclvs pstaittwmk dgsnirespk hrfiadgkdr klhiidvqls dageytcvlr |
| 12121 | lgnkektsta klvveelpvr fvktleeevt vvkgqplyls celnkerdvv wrkdgkivve |
| 12181 | kpgrivpgvi glmraltind addtdagtyt vtvenannle csscvkvvev irdwlvkpir |
| 12241 | dqhvkpkgta ifacdiakdt pnikwfkgyd eipaepndkt eiirdgnhly lkiknamped |
| 12301 | iaeyaveieg krypakltlg erevellkpi edvtiyekes asfdaeisea dipgqwklkg |
| 12361 | ellrpsptce ikaeggkrfl tlrkvkldqa gevlyqalna ittailtvke ieldfavplk |
| 12421 | dvtvperrqa rfecvltrea nviwskgpdi ikssdkfdii adgkkhilvi ndsqfddegv |
| 12481 | ytaevegkkt sarlfvtgir lkfmspledq tvkegetatf vcelshekmh vvwfkndakl |
| 12541 | htsrtvliss egkthklemk evtlddisqi kaqvkelsst aqlkvleadp yftvklhdkt |
| 12601 | avekdeitlk cevskdvpvk wfkdgeeivp spkysikadg lrrilkikka dlkdkgeyvc |
| 12661 | dcgtdktkan vtvearlikv ekplygvevf vgetahfeie lsepdvhgqw klkgqpltas |
| 12721 | pdceiiedgk khililhncq lgmtgevsfq aanaksaanl kvkelplifi tplsdvkvfe |
| 12781 | kdeakfecev srepktfrwl kgtqeitgdd rfelikdgtk hsmviksaaf edeakymfea |
| 12841 | edkhtsgkli iegirlkflt plkdvtakek esavftvels hdnirvkwfk ndqrlhttrs |
| 12901 | vsmqdegkth sitfkdlsid dtsqirveam gmsseakltv legdpyftgk lqdytgvekd |
| 12961 | evilqceisk adapvkwfkd gkeikpskna vikadgkkrm lilkkalksd igqytcdcgt |
| 13021 | dktsgkldie dreiklvrpl hsvevmetet arfeteised dihanwklkg eallqtpdce |
| 13081 | ikeegkihsl vlhncrldqt ggvdfqaanv kssahlrvkp rvigllrplk dvtvtageta |
| 13141 | tfdcelsyed ipvewylkgk klepsdkvvp rsegkvhtlt lrdvkledag evqltakdfk |
| 13201 | thanlfvkep pveftkpled qtveegatav lecevsrena kvkwfkngte ilkskkyeiv |
| 13261 | adgrvrklvi hdctpedikt ytcdakdfkt scnlnvvpph veflrpltdl qvrekemarf |
| 13321 | ecelsrenak vkwfkdgaei kkykkydiis kgavrilvin kcllddeaey scevrtarts |
| 13381 | gmltvleeea vftknlanie vsetdtiklv cevskpgaev iwykgdeeii etgryeilte |
| 13441 | grkrilviqn ahledagnyn crlpssrtdg kvkvhelaae fiskpqnlei legekaefvc |
| 13501 | siskesfpvq wkrddktles gdkydviadg kkrvlvvkda tlqdmgtyvv mvgaaraaah |
| 13561 | ltvieklriv vplkdtrvke qqevvfncev ntegakakwf rneeaifdss kyiilqkdlv |
| 13621 | ytlrirdahl ddqanynvsl tnhrgenvks aanliveeed lriveplkdi etmekksvtf |
| 13681 | wckvnrlnvt lkwtkngeev pfdnrvsyrv dkykhmltik dcgfpdegey ivtagqdksv |
| 13741 | aelliieapt efvehledqt vtefddavfs cqlsrekanv kwyrngreik egkkykfekd |
| 13801 | gsihrliikd criddeceya cgvedrksra rlfveeipve iirppqdile apgadvvfla |
| 13861 | elnkdkvevq wlrnnmvvvq gdkhqmmseg kihrlqicdi kprdqgeyrf iakdkearak |
| 13921 | lelaaapkik tadqdlvvdv gkpltmvvpy daypkaeaew fkeneplstk tidttaeqts |
| 13981 | frileakkgd kgrykivlqn khgkaegfin lkvidvpgpv rnlevtetfd gevslaweep |
| 14041 | ltdggskiig yvverrdikr ktwvlatdra esceftvtgl qkggveylfr vsarnrvgtg |
| 14101 | epvetdnpve arskydvpgp plnvtitdvn rfgvsltwep peydggaeit nyvielrdkt |
| 14161 | sirwdtamtv raedlsatvt dvveggeysf rvraqnrigv gkpsaatpfv kvadpierps |
| 14221 | ppvnitssdq tqssvqlkwe pplkdggspi lgyiiercee gkdnwircnm klvpeltykv |
| 14281 | tglekgnkyl yrvsaenkag vsdpseilgp ltaddafvep tmdlsafkdg levivpnpit |
| 14341 | ilvpstgypr ptatwcfgdk vletgdrvkm ktlsayaelv ispsersdkg iytlklenrv |
| 14401 | ktisgeidvn viarpsapke lkfgditkds vhltweppdd dggspltgyv vekrevsrkt |
| 14461 | wtkvmdfvtd leftvpdlvq gkeylfkvca rnkcgpgepa yvdepvnmst patvpdppen |
| 14521 | vkwrdrtans ifltwdppkn dggsrikgyi vercprgsdk wvacgepvae tkmevtglee |
| 14581 | gkwyayrvka lnrqgaskps rpteeiqavd tqeapeifld vkllagltvk agtkielpat |
| 14641 | vtgkpepkit wtkadmilkq dkritienvp kkstvtivds krsdtgtyii eavnvcgrat |
| 14701 | avvevnvldk pgppaafdit dvtnescllt wnpprddggs kitnyvverr atdsevwhkl |
| 14761 | sstvkdtnfk atklipnkey ifrvaaenmy gvgepvqasp itakyqfdpp gpptrlepsd |
| 14821 | itkdavtltw cepdddggsp itgywverld pdtdkwvrcn kmpvkdttyr vkgltnkkky |
| 14881 | rfrvlaenla gpgkpskste pilikdpidp pwppgkptvk dvgktsvrln wtkpehdgga |
| 14941 | kiesyvieml ktgtdewvrv aegvpttqhl lpglmegqey sfrvravnka gesepsepsd |
| 15001 | pvlcreklyp pspprwlevi nitkntadlk wtvpekdggs pitnyivekr dvrrkgwqtv |
| 15061 | dttvkdtkct vtpltegsly vfrvaaenai gqsdyteied svlakdtftt pgppyalavv |
| 15121 | dvtkrhvdlk weppkndggr pigryviekk erlgtrwvka gktagpdcnf rvtdviegte |
| 15181 | vqfqvraene agvghpsept eilsiedpts ppsppldlhv tdagrkhiai awkppekngg |
| 15241 | spiigyhvem cpvgtekwmr vnsrpikdlk fkveegvvpd keyvlrvrav naigvsepse |
| 15301 | isenvvakdp dckptidlet hdiiviegek lsipvpfrav pvptvswhkd gkevkasdrl |
| 15361 | tmkndhisah levpksvrad agiytitlen klgsatasin vkviglpgpc kdikasditk |
| 15421 | ssckltwepp efdggtpilh yvlerreagr rtyipvmsge nklswtvkdl ipngeyffrv |
| 15481 | kavnkvggge yielknpvia gdpkgppdpp vdvevhnpta eamtitwkpp lydggskimg |
| 15541 | yiiekiakge erwkrcnehl vpiltytakg leegkeyqfr vraenaagis epsratpptk |
| 15601 | avdpidapkv ilrtslevkr gdeialdasi sgspyptitw ikdenvivpe eikkraaplv |
| 15661 | rrrkgevqee epfvlpltqr lsidnskkge sqlrvrdslr pdhglymikv endhgiakap |
| 15721 | ctvsvldtpg ppinfvfedi rktsvlckwe pplddggsei inytlekkdk tkpdsewivv |
| 15781 | tstlrhckys vtkliegkey lfrvraenrf gpgppcvskp lvakdpfgpp dapdkpived |
| 15841 | vtsnsmlvkw nepkdngspi igywlekrev nsthwsrvnk sllnalkanv dgllegltyv |
| 15901 | frvcaenaag pgkfsppsdp ktandpispp gppiprvtdt ssttielewe ppafngggei |
| 15961 | vgyfvdkqlv gtnewsrcte kmikvrqytv keiregadyk lrvsavnaag egppgetqpv |
| 16021 | tvaepqeppa veldvsvkgg igimagktlr ipavvtgrpv ptkvwtkeeg eldkdrvvid |
| 16081 | nvgtkselii kdalrkdhgr yvitatnscg skfaaarvev fdvpgpvldl kpvvtnrkmc |
| 16141 | llnwsdpedd ggseitgfii erkdakmhtw rqpietersk cditgllegq eykfrviakn |
| 16201 | kfgcgppvei gpilavdplg pptsperlty tertkstitl dwkeprsngg spiqgyiiek |
| 16261 | rrhdkpdfer vnkrlcptts flvenldehq myefrvkavn eigesepslp lnvviqddev |
| 16321 | pptiklrlsv rgdtikvkag epvhipadvt glpmpkiews knetviekpt dalqitkeev |
| 16381 | srseaktels ipkavredkg tytvtasnrl gsvfrnvhve vydrpspprn lavtdikaes |
| 16441 | cyltwdapld nggseithyv idkrdasrkk aeweevtnta vekrygiwkl ipngqyefrv |
| 16501 | ravnkygisd ecksdkvviq dpyrlpgppg kpkvlartkg smlvswtppl dnggspitgy |
| 16561 | wlekreegsp ywsrvsrapi tkvglkgvef nvprllegvk yqframaina agigppseps |
| 16621 | dpevagdpif ppgppscpev kdktkssisl gwkppakdgg spikgyivem qeegttdwkr |
| 16681 | vnepdklitt cecvvpnlke lrkyrfrvka vneageseps dttgeipatd iqeepevfid |
| 16741 | igaqdclvck agsqiripav ikgrptpkss wefdgkakka mkdgvhdipe daqletaens |
| 16801 | sviiipeckr shtgkysita knkagqktan crvkvmdvpg ppkdlkvsdi trgscrlswk |
| 16861 | mpdddggdri kgyviekrti dgkawtkvnp dcgsttfvvp dllseqqyff rvraenrfgi |
| 16921 | gppvetiqrt tardpiyppd ppiklkigli tkntvhlswk ppkndggspv thyiveclaw |
| 16981 | dptgtkkeaw rqcnkrdvee lqftvedlve ggeyefrvka vnaagvskps atvgpcdcqr |
| 17041 | pdmppsidlk efmeveegtn vnivakikgv pfptltwfka ppkkpdnkep vlydthvnkl |
| 17101 | vvddtctlvi pqsrrsdtgl ytitavnnlg taskemrlnv lgrpgppvgp ikfesysadq |
| 17161 | mtlswfppkd dggskitnyv iekreanrkt wvhvssepke ctytipklle gheyvfrima |
| 17221 | qnkygigepl dsepetarnl fsvpgapdkp tvssvtrnsm tvnweepeyd ggspvtgywl |
| 17281 | emkdttskrw krvnrdpika mtlgvsykvt gliegsdyqf rvyainaagv gpaslpsdpa |
| 17341 | tardpiappg ppfpkvtdwt kssadlewsp plkdggskvt gyiveykeeg keewekgkdk |
| 17401 | evrgtklvvt glkegafykf rvsavniagi gepgevtdvi emkdrlvspd lqldasvrdr |
| 17461 | ivvhaggvir iiayvsgkpp ptvtwnmner tlpqeatiet taisssmvik ncqrshqgvy |
| 17521 | sllakneage rkktiivdvl dvpgpvgtpf lahnitnesc kltwfspedd ggspitnyvi |
| 17581 | ekresdrraw tpvtytvtrq natvqgliqg kayffriaae nsigmgpfve tsealvirep |
| 17641 | itvperpedl evkevtkntv tltwnppkyd ggseiinyvl esrligtekf hkvtndnlls |
| 17701 | rkytvkglke gdtyeyrvsa vnivgqgkps fctkpitckd elapptlhld frdkltirvg |
| 17761 | eafaltgrys gkpkpkvswf kdeadvledd rthikttpat lalekikakr sdsykycvvv |
| 17821 | enstgsrkgf cqvnvvdrpg ppvgpvsfde vtkdymvisw kpplddggsk itnyiiekke |
| 17881 | vgkdvwmpvt sasakttckv skllegkdyi frihaenlyg isdplvsdsm kakdrfrvpd |
| 17941 | apdqpivtev tkdsalvtwn kphdggkpit nyilekretm skrwarvtkd pihpytkfrv |
| 18001 | pdllegcqye frvsaeneig igdpsppskp vfakdpiakp sppvnpeaid ttcnsvdltw |
| 18061 | qpprhdggsk ilgyiveyqk vgdeewrran htpescpetk ykvtglrdgq tykfrvlavn |
| 18121 | aagesdpahv pepvlvkdrl eppelildan mareqhikvg dtlrlsaiik gvpfpkvtwk |
| 18181 | kedrdaptka ridvtpvgsk leirnaahed ggiysltven pagsktvsvk vlvldkpgpp |
| 18241 | rdlevseirk dscyltwkep lddggsvitn yvverrdvas aqwsplsats kkkshfakhl |
| 18301 | negnqylfrv aaenqygrgp fvetpkpika ldplhppgpp kdlhhvdvdk tevslvwnkp |
| 18361 | drdggspitg ylveyqeegt qdwikfktvt nlecvvtglq qgktyrfrvk aenivglglp |
| 18421 | dttipiecqe klvppsveld vklieglvvk agttvrfpai irgvpvptak wttdgseikt |
| 18481 | dehytvetdn fssvltiknc lrrdtgeyqi tvsnaagskt vavhltvldv pgpptgpini |
| 18541 | ldvtpehmti swqppkddgg spvinyivek qdtrkdtwgv vssgssktkl kiphlqkgce |
| 18601 | yvfrvraenk igvgppldst ptvakhkfsp psppgkpvvt ditenaatvs wtlpksdggs |
| 18661 | pitgyymerr evtgkwvrvn ktpiadlkfr vtglyegnty efrvfaenla glskpspssd |
| 18721 | pikacrpikp pgppinpklk dksretadlv wtkplsdggs pilgyvvecq kpgtaqwnri |
| 18781 | nkdelirqca frvpgliegn eyrfrikaan ivgegeprel aesviakdil hppeveldvt |
| 18841 | crdvitvrvg qtirilarvk grpepditwt kegkvlvrek rvdliqdlpr velqikeavr |
| 18901 | adhgkyiisa knssghaqgs aivnvldrpg pcqnlkvtnv tkenctiswe npldnggsei |
| 18961 | tnfiveyrkp nqkgwsivas dvtkrlikan llanneyyfr vcaenkvgvg ptietktpil |
| 19021 | ainpidrpge penlhiadkg ktfvylkwrr pdydggspnl syhverrlkg sddwervhkg |
| 19081 | sikethymvd rcvenqiyef rvqtknegge sdwvkteevv vkedlqkpvl dlklsgvltv |
| 19141 | kagdtirlea gvrgkpfpev awtkdkdatd ltrsprvkid tradsskfsl tkakrsdggk |
| 19201 | yvvtatntag sfvayatvnv ldkpgpvrnl kivdvssdrc tvcwdppedd ggceiqnyil |
| 19261 | ekcetkrmvw stysatvltp gttvtrlieg neyifrvrae nkigtgppte skpviaktky |
| 19321 | dkpgrpdppe vtkvskeemt vvwnppeydg gksitgyfle kkekhstrwv pvnksaiper |
| 19381 | rmkvqnllpd heyqfrvkae neigigepsl psrpvvakdp ieppgpptnf rvvdttkhsi |
| 19441 | tlgwgkpvyd ggapiigyvv emrpkiadas pdegwkrcna aaqlvrkeft vtsldenqey |
| 19501 | efrvcaqnqv gigrpaelke aikpkeilep peidldasmr klvivragcp irlfaivrgr |
| 19561 | papkvtwrkv gidnvvrkgq vdlvdtmafl vipnstrdds gkysltlvnp agekavfvnv |
| 19621 | rvldtpgpvs dlkvsdvtkt schvswappe ndggsqvthy ivekreadrk twstvtpevk |
| 19681 | ktsfhvtnlv pgneyyfrvt avneygpgvp tdvpkpvlas dplsepdppr klevtemtkn |
| 19741 | satlawlppl rdggakidgy itsyreeeqp adrwteysvv kdlslvvtgl kegkkykfrv |
| 19801 | aarnavgvsl preaegvyea keqllppkil mpeqitikag kklrieahvy gkphptckwk |
| 19861 | kgedevvtss hlavhkadss siliikdvtr kdsgyyslta enssgtdtqk ikvvvmdapg |
| 19921 | ppqppfdisd idadacslsw hipledggsn itnyivekcd vsrgdwvtal asvtktscrv |
| 19981 | gklipgqeyi frvraenrfg isepltspkm vaqfpfgvps epknarvtkv nkdcifvawd |
| 20041 | rpdsdggspi igylierker nsllwvkand tlvrsteypc aglvegleys friyalnkag |
| 20101 | ssppskptey vtarmpvdpp gkpevidvtk stvsliwarp khdggskiig yfveacklpg |
| 20161 | dkwvrcntap hqipqeeyta tgleekaqyq fraiartavn isppsepsdp vtilaenvpp |
| 20221 | ridlsvamks lltvkagtnv cldatvfgkp mptvswkkdg tllkpaegik mamqrnlctl |
| 20281 | elfsvnrkds gdytitaens sgsksatikl kvldkpgppa svkinkmysd ramlsweppl |
| 20341 | edggseitny ivdkretsrp nwaqvsatvp itscsvekli egheyqfric aenkygvgdp |
| 20401 | vftepaiakn pydppgrcdp pvisnitkdh mtvswkppad dggspitgyl lekretqavn |
| 20461 | wtkvnrkpii ertikatglq egteyefrvt ainkagpgkp sdaskaayar dpqyppappa |
| 20521 | fpkvydttrs svslswgkpa ydggspiigy lvevkradsd nwvrcnlpqn lqktrfevtg |
| 20581 | lmedtqyqfr vyavnkigys dpsdvpdkhy pkdilippeg eldadlrktl ilragvtmrl |
| 20641 | yvpvkgrppp kitwskpnvn lrdrigldik stdfdtflrc envnkydagk yiltlpnscg |
| 20701 | kkeytivvkv ldtpgppvnv tvkeiskdsa yvtweppiid ggspiinyvv qkrdaerksw |
| 20761 | stvttecskt sfrvanleeg ksyffrvfae neygigdpge trdavkasqt pgpvvdlkvr |
| 20821 | svsksscsig wkkphsdggs riigyvvdfl teenkwqrvm kslslqysak dltegkeytf |
| 20881 | rvsaenenge gtpseitvva rddvvapdld lkglpdlcyl akensnfrlk ipikgkpaps |
| 20941 | vswkkgedpl atdtrvsves savnttlivy dcqksdagky titlknvagt kegtisikvv |
| 21001 | gkpgiptgpi kfdevtaeam tlkwappkdd ggseitnyil ekrdsvnnkw vtcasavqkt |
| 21061 | tfrvtrlheg meytfrvsae nkygvgeglk sepivarhpf dvpdappppn ivdvrhdsvs |
| 21121 | ltwtdpkktg gspitgyhle fkernsllwk ranktpirmr dfkvtglteg leyefrvmai |
| 21181 | nlagvgkpsl psepvvaldp idppgkpevi nitrnsvtli wtepkydggh kltgyivekr |
| 21241 | dlpskswmka nhvnvpecaf tvtdlveggk yefriraknt agaisapses tetiickdey |
| 21301 | eaptivldpt ikdgltikag dtivlnaisi lgkplpkssw skagkdirps ditqitstpt |
| 21361 | ssmltikyat rkdageytit atnpfgtkve hvkvtvldvp gppgpveisn vsaekatltw |
| 21421 | tppledggsp iksyilekre tsrllwtvvs ediqscrhva tkliqgneyi frvsavnhyg |
| 21481 | kgepvqsepv kmvdrfgppg ppekpevsnv tkntatvswk rpvddggsei tgyhverrek |
| 21541 | kslrwvraik tpvsdlrckv tglqegstye frvsaenrag igppseasds vlmkdaaypp |
| 21601 | gppsnphvtd ttkksaslaw gkphydggle itgyvvehqk vgdeawikdt tgtalritqf |
| 21661 | vvpdlqtkek ynfrisaind agvgepavip dveiverema pdfeldaelr rtlvvragls |
| 21721 | irifvpikgr papevtwtkd ninlknrani entesftlli ipecnrydtg kfvmtienpa |
| 21781 | gkksgfvnvr vldtpgpvln lrptditkds vtlhwdlpli dggsritnyi vekreatrks |
| 21841 | ystattkchk ctykvtglse gceyffrvma eneygigept ettepvkase apsppdslni |
| 21901 | mditkstvsl awpkpkhdgg skitgyviea qrkgsdqwth ittvkglecv vrnltegeey |
| 21961 | tfqvmavnsa grsapresrp vivkeqtmlp eldlrgiyqk lviakagdni kveipvlgrp |
| 22021 | kptvtwkkgd qilkqtqrvn fettatstil ninecvrsds gpypltarni vgevgdviti |
| 22081 | qvhdipgppt gpikfdevss dfvtfswdpp endggvpisn yvvemrqtds ttwvelattv |
| 22141 | irttykatrl ttgleyqfrv kaqnrygvgp gitsacivan ypfkvpgppg tpqvtavtkd |
| 22201 | smtiswhepl sdggspilgy hverkerngi lwqtvskalv pgnifkssgl tdgiayefrv |
| 22261 | iaenmagksk pskpsepmla ldpidppgkp vplnitrhtv tlkwakpeyt ggfkitsyiv |
| 22321 | ekrdlpngrw lkanfsnile neftvsglte daayefrvia knaagaispp sepsdaitcr |
| 22381 | ddveapkikv dvkfkdtvil kageafrlea dvsgrppptm ewskdgkele gtakleikia |
| 22441 | dfstnlvnkd strrdsgayt ltatnpggfa khifnvkvld rpgppegpla vtevtsekcv |
| 22501 | lswfpplddg gakidhyivq kretsrlawt nvasevqvtk lkvtkllkgn eyifrvmavn |
| 22561 | kygvgeples epvlavnpyg ppdppknpev ttitkdsmvv cwghpdsdgg seiinyiver |
| 22621 | rdkagqrwik cnkktltdlr ykvsgltegh eyefrimaen aagisapspt spfykacdtv |
| 22681 | fkpgppgnpr vldtsrssis iawnkpiydg gseitgymve ialpeedewq ivtppaglka |
| 22741 | tsytitglte nqeykiriya mnseglgepa lvpgtpkaed rmlppeield adlrkvvtir |
| 22801 | acctlrlfvp ikgrpapevk wardhgesld kasiestssy tllivgnvnr fdsgkyiltv |
| 22861 | enssgsksaf vnvrvldtpg ppqdlkvkev tktsvtltwd pplldggski knyivekres |
| 22921 | trkaystvat nchktswkvd qlwegcsyyf rvlaeneygi glpaetaesv kaserplppg |
| 22981 | kitlmdvtrn sbslswekpe hdggsrilgy ivemqtkgsd kwatcatvkv teatitgliq |
| 23041 | geeysfrvsa qnekgisdpr qlsvpviakd lvippafkll fntftvlage dlkvdvpfig |
| 23101 | rptpavtwhk dnvplkqttr vnaestenns lltikdacre dvghyvvklt nsageaietl |
| 23161 | nvivldkpgp ptgpvkmdev tadsitlswg ppkydggssi nnyivekrdt stttwqivsa |
| 23221 | tvarttikac rlktgceyqf riaaenrygk stylnseptv aqypfkvpgp pgtpvvtlss |
| 23281 | rdsmevqwne pisdggsrvi gyhlerkern silwvklnkt pipqtkfktt gleegveyef |
| 23341 | rvsaenivgi gkpskvsecy vardpcdppg rpeaiivtrn svtlqwkkpt ydggskitgy |
| 23401 | ivekkelpeg rwmkasftni idthfevtgl vedhryefrv iarnaagvfs epsestgait |
| 23461 | ardevdppri smdpkykdti vvhagesfkv dadiygkpip tigwikgdqe lsntarleik |
| 23521 | stdfatslsv kdavrvdsgn yilkaknvag ersvtvnvkv ldrpgppegp vvisgvtaek |
| 23581 | ctlawkpplq dggsdiinyi verretsrlv wtvvdanvqt lsckvtklle gneytfrima |
| 23641 | vnkygvgepl esepvvaknp fvvpdapkap evttvtkdsm ivvwerpasd ggseilgyvl |
| 23701 | ekrdkegirw trchkrlige lrlrvtglie nhdyefrvsa enaaglseps ppsayqkacd |
| 23761 | piykpgppnn pkviditrss vflswskpiy dggceiqgyi vekcdvsvge wtmctpptgi |
| 23821 | nktnievekl lekheynfri cainkagvge hadvpgpiiv eekleapdid ldlelrkiin |
| 23881 | iraggslrlf vpikgrptpe vkwgkvdgei rdaaiidvts sftslvldnv nrydsgkytl |
| 23941 | tlenssgtks afvtvrvldt psppvnlkvt eitkdsysit wepplldggs kiknyivekr |
| 24001 | eatrksyaav vtnchknswk idqlqegcsy yfrvtaeney giglpaqtad pikvaevpqp |
| 24061 | pgkitvddvt rnsyslswtk pehdggskii gyivemgakh sekwsecarv kslqavitnl |
| 24121 | tqgeeylfrv vavnekgrsd prslavpiva kdlviepdvk pafssysvqv gqdlkievpi |
| 24181 | sgrpkptitw tkdglplkqt trinvtdsld lttlsiketh kddggqygit vanvvgqkta |
| 24241 | sieivtldkp dppkgpvkfd dvsaesitls wnpplytggc qitnyivqkr dttttvwdvv |
| 24301 | satvarttlk vtklktgtey qfrifaenry gqsfalesdp ivaqypykep gppgtpfata |
| 24361 | iskdsmviqw hepvnnggsp vigyhlerke rnsilwtkvn ktiihdtqfk aqnleegiey |
| 24421 | efrvyaeniv gvgkasknse cyvardpcdp pgtpepimvk rneitiqwtk pvydggsmit |
| 24481 | gyivekrdlp dgrwmkasft nvietqftvs gltedqryef rviaknaaga iskpsdstgp |
| 24541 | itakdevelp rismdpkfrd tivvnagetf rleadvhgkp lptiewlrgd keieesarce |
| 24601 | ikntdfkall ivkdairidg gqyilrasnv agsksfpvnv kvldrpgppe gpvqvtgvts |
| 24661 | ekcsltwspp lqdggsdish yvvekretsr lawtvvasev vtnslkvtkl legneyvfri |
| 24721 | mavnkygvge plesapvlmk npfvlpgppk slevtniakd smtvcwnrpd sdggseiigy |
| 24781 | ivekrdrsgi rwikcnkrri tdlrlrvtgl tedheyefrv saenaagvge pspatvyyka |
| 24841 | cdpvfkpypp tnahivdttk nsitlawgkp iydggseilg yvveickade eewqivtpqt |
| 24901 | glrvtrfeis kltehqeyki rvcalnkvgl geatsvpgtv kpedkleape ldldselrkg |
| 24961 | ivvraggsar ihipfkgrpt peitwsreeg eftdkvqiek gvnytqlsid ncdrndagky |
| 25021 | ilklenssgs ksafvtvkvl dtpgppqnla vkevrkdsaf lvweppiidg gakvknyvid |
| 25081 | krestrkaya nvsskcskts fkvenltega iyyfrvmaen efgvgvpvet vdavkaaepp |
| 25141 | sppgkvtltd vsqtsaslmw ekpehdggsr vlgyvvemqp kgtekwsiva eskvcnavvt |
| 25201 | glssgqeyqf rvkaynekgk sdprvlgvpv iakdltiqps lklpfntysi qagedlkiei |
| 25261 | pvigrprpni swvkdgeplk qttrvnveet atstvlhike gnkddfgkyt vtatnsagta |
| 25321 | tenlsvivle kpgppvgpvr fdevsadfvv isweppaytg gcqisnyive krdtttttwh |
| 25381 | mvsatvartt ikitklktgt eyqfrifaen rygksaplds kavivqypfk epgppgtpfv |
| 25441 | tsiskdqmlv qwhepvndgg tkiigyhleq keknsilwvk lnktpiqdtk fkttgldegl |
| 25501 | eyefkvsaen ivgigkpskv secfvardpc dppgrpeaiv itrnnvtlkw kkpaydggsk |
| 25561 | itgyivekkd lpdgrwmkas ftnvleteft vsglvedqry efrviarnaa gnfsepsdss |
| 25621 | gaitardeid apnasldpky kdvivvhage tfvleadirg kpipdvvwsk dgkeleetaa |
| 25681 | rmeikstiqk ttlvvkdcir tdgggyilkl snvggtksip itvkvldrpg ppegplkvtg |
| 25741 | vtaekcylaw npplqdggan ithyiiekre tsrlswtqvs tevqalnykv tkllpgneyi |
| 25801 | frvmavnkyg igeplesgpv tacnpykppg ppstpevsai tkdsmvvtwa rpvddggtei |
| 25861 | egyilekrdk egvrwtkcnk ktltdlrlrv tglteghsye frvaaenaag vgepsepsvf |
| 25921 | yracdalypp gppsnpkvtd tsrssvslaw skpiydggap vkgyvvevke aaadewttct |
| 25981 | pptglqgkqf tvtklkente ynfricains egvgepatlp gsvvaqerie ppeieldadl |
| 26041 | rkvvvlrasa tlrlfvtikg rpepevkwek aegiltdraq ievtssftml vidnvtrfds |
| 26101 | grynitlenn sgsktafvnv rvldspsapv nltirevkkd svtlsweppl idggakitny |
| 26161 | ivekrettrk ayatitnnct kttfrienlq egcsyyfrvl asneygiglp aettepvkvs |
| 26221 | epplppgrvt lvdvtrntat ikwekpesdg gskitgyvve mqtkgsekws tctqvktlea |
| 26281 | tisgltagee yvfrvaavne kgrsdprqlg vpviardiei kpsvelpfht fnvkareqlk |
| 26341 | idvpfkgrpq atvnwrkdgq tlkettrvnv sssktvtsls ikeaskedvg tyelcvsnsa |
| 26401 | gsitvpitii vldrpgppgp iridevscds itiswnppey dggcqisnyi vekkettstt |
| 26461 | whivsqavar tsikivrltt gseyqfrvca enrygkssys essavvaeyp fsppgppgtp |
| 26521 | kvvhatkstm lvtwqvpvnd ggsrvigyhl eykerssilw skankiliad tqmkvsglde |
| 26581 | glmyeyrvya eniagigkcs kscepvpard pcdppggpev tnitrksysl kwskphydgg |
| 26641 | akitgyiver relpdgrwlk cnytniqety fevteltedq ryefrvfarn aadsvsepse |
| 26701 | stgpiivkdd vepprvmmdv kfrdvivvka gevlkinadi agrplpvisw akdgieieer |
| 26761 | arteiistdn htlltvkdci rrdtgqyvlt lknvagtrsv avnckvldkp gppagplein |
| 26821 | gltaekcsls wgrpqedgga didyyivekr etshlawtic egelqmtsck vtkllkgney |
| 26881 | ifrvtgvnky gvgeplesva ikaldpftvp spptsleits vtkesmtlcw srpesdggse |
| 26941 | isgyiierre knslrwvrvn kkpvydlrvk stglregcey eyrvyaenaa glslpsetsp |
| 27001 | liraedpvfl psppskpkiv dsgkttitia wvkplfdgga pitgytveyk ksddtdwkts |
| 27061 | iqslrgteyt isglttgaey vfrvksvnkv gasdpsdssd pqiakereee plfdidsemr |
| 27121 | ktlivkagas ftmtvpfrgr pvpnvlwskp dtdlrtrayv dttdsrtslt ienanrndsg |
| 27181 | kytltiqnvl saasltlvvk vldtpgpptn itvqdvtkes avlswdvpen dggapvknyh |
| 27241 | iekreaskka wvsvtnncnr lsykvtnlqe gaiyyfrvsg enefyvgipa etkegvkite |
| 27301 | kpsppeklgv tsiskdsysl twlkpehdgg srivhyvvea lekgqknwvk cavaksthhv |
| 27361 | vsglrensey ffrvfaenqa glsdprelll pvlikeqlep peidmknfps htvyvragsn |
| 27421 | lkvdipisgk plpkvtlsrd gvplkatmrf nteitaenlt inlkesvtad agryeitaan |
| 27481 | ssgttkafin ivvldrpgpp tgpvvisdit eesvtlkwep pkydggsqvt nyillkrets |
| 27541 | tavwtevsat vartmmkvmk lttgeeyqfr ikaenrfgis dhidsacvtv klpyttpgpp |
| 27601 | stpwvtnvtr esitvgwhep vsnggsavvg yhlemkdrns ilwqkanklv irtthfkvtt |
| 27661 | isagliyefr vyaenaagvg kpshpsepvl aidacepprn vritdiskns vslswqqpaf |
| 27721 | dggskitgyi verrdlpdgr wtkasftnvt etqfiisglt qnsqyefrvf arnavgsisn |
| 27781 | psevvgpitc idsyggpvid lpleytevvk yragtsvklr agisgkpapt iewykddkel |
| 27841 | qtnalvcven ttdlasilik dadrlnsgcy elklrnamgs asatirvqil dkpgppggpi |
| 27901 | efktvtaeki tllwrppadd ggakithyiv ekretsrvvw smvsehleec iitttkiikg |
| 27961 | neyifrvrav nkygigeple sdsvvaknaf vtpgppgipe vtkitknsmt vvwsrpiadg |
| 28021 | gsdisgyfle krdkkslgwf kvlketirdt rqkvtglten sdyqyrvcav naagqgpfse |
| 28081 | psefykaadp idppgppaki riadstkssi tlgwskpvyd ggsavtgyvv eirqgeeeew |
| 28141 | ttvstkgevr tteyvvsnlk pgvnyyfrvs avncagqgep iemnepvqak dileapeidl |
| 28201 | dvalrtsvia kagedvqvli pfkgrppptv twrkdeknlg sdarysient dssslltipq |
| 28261 | vtrndtgkyi ltiengvgep ksstvsvkvl dtpaacqklq vkhvsrgtvt llwdpplidg |
| 28321 | gspiinyvie krdatkrtws vvshkcssts fklidlsekt pfffrvlaen eigigepcet |
| 28381 | tepvkaaevp apirdlsmkd stktsvilsw tkpdfdggsv iteyvverkg kgeqtwshag |
| 28441 | isktceievs qlkegsvlef rvfaknekgl sdpvtigpit vkeliitpev dlsdipgaqv |
| 28501 | tvrighnvhl elpykgkpkp siswlkdglp lkesefvrfs ktenkitlsi knakkehggk |
| 28561 | ytvildnavc riavpitvit lgppskpkgp irfdeikads vilswdvped ngggeitcys |
| 28621 | iekretsqtn wkmvcssvar ttfkvpnlvk daeyqfrvra enrygvsqpl vssiivakhq |
| 28681 | fripgppgkp viynvtsdgm sltwdapvyd ggsevtgfhv ekkernsilw qkvntspisg |
| 28741 | reyratglve gldyqfrvya ensaglssps dpskftlavs pvdppgtpdy idvtretitl |
| 28801 | kwnpplrdgg skivgysiek rqgnerwvrc nftdvsecqy tvtglspgdr yefriiarna |
| 28861 | vgtisppsqs sgiimtrden vppivefgpe yfdgliiksg eslrikalvq grpvprvtwf |
| 28921 | kdgveiekrm nmeitdvlgs tslfvrdatr dhrgvytvea knasgsakae ikvkvqdtpg |
| 28981 | kvvgpirftn itgekmtlww daplndgcap ithyiiekre tsrlawalie dkceaqsyta |
| 29041 | iklingneyq frvsavnkfg vgrpldsdpv vaqiqytvpd apgipepsni tgnsitltwa |
| 29101 | rpesdggsei qqyilerrek kstrwvkvis krpisetrfk vtgltegney efhvmaenaa |
| 29161 | gvgpasgisr likcrepvnp pgpptvvkvt dtskttvsle wskpvfdggm eiigyiiemc |
| 29221 | kadlgdwhkv naeacvktry tvcdlqagee ykfrvsaing agkgdscevt gtikavdrlt |
| 29281 | apeldidanf kgthvvraga sirlflayqg rptptavwsk pdsnlslrad ihttdsfstl |
| 29341 | tvencnrnda gkytltvenn sgsksitftv kvldtpgppg pitfkdvtrg satlmwdapl |
| 29401 | ldggarihhy vvekreasrr swqvisekct rqifkvndla egvpyyfrvs avneygvgep |
| 29461 | yempepivat eqpapprrld vvdtskssav lawlkpdhdg gsritgylle mrqkgsdfwv |
| 29521 | eaghtkqltf tverlvekte yefrvkaknd agysepreaf ssviikepqi eptadltgit |
| 29581 | nqlitckags pftidvpisg rpapkvtwkl eemrlketdr vsitttkdrt tltvkdsmrg |
| 29641 | dsgryfltle ntagvktfsv tvvvigrpgp vtgpievssv saescvlswg epkdgggtei |
| 29701 | tnyivekres gttawqlvns svkrtgikvt hltkymeysf rvssenrfgv skplesapii |
| 29761 | aehpfvppsa ptrpevyhvs anamsirwee pyhdggskii gywvekkern tilwvkenkv |
| 29821 | pclecnykvt glvegleyqf rtyalnaagv skaseasrpi maqnpvdapg rpevtdvtrs |
| 29881 | tvsliwsapa ydggskvvgy iierkpvsev gdgrwlkcny tivsdnfftv talsegdtye |
| 29941 | frvlaknaag viskgsestg pvtcrdeyap pkaeldarlh gdlvtirags dlvldaavgg |
| 30001 | kpepkiiwtk gdkeldlcek vslqytgkra tavikfcdrs dsgkytltvk nasgtkavsv |
| 30061 | mvkvldspgp cgkltvsrvt gekctlawsl pqedggaeit hyiverrets rlnwvivege |
| 30121 | cptlsyvvtr liknneyifr vravnkygpg vpvesepiva rnsftipspp gipeevgtgk |
| 30181 | ehiiiqwtkp esdggneisn ylvdkrekks lrwtrvnkdy vvydtrlkvt slmegcdyqf |
| 30241 | rvtavnaagn sepseasnfi screpsytpg ppsaprvvdt tkhsislawt kpmydggtdi |
| 30301 | vgyvlemgek dtdqwyrvht natirnteft vpdlkmgqky sfrvaavnvk gmseysesia |
| 30361 | eiepveriei pdleladdlk ktvtiragas lrlmvsysgr pppvitwskq gidlasraii |
| 30421 | dttesyslli vdkvnrydag kytieaenqs gkksatvlvk vydtpgpcps vkvkevsrds |
| 30481 | vtitweipti dggapvnnyi vekreaamra fktvttkcsk tlyrisglve gtmyyfrvlp |
| 30541 | eniygigepc etsdavlvse vplvpaklev vdvtkstvtl awekplydgg srltgyvlea |
| 30601 | ckagterwmk vvtlkptvle htvtslnege qylfriraqn ekgvsepret vtavtvqdlr |
| 30661 | vlptidlstm pqktihvpag rpvelvipia grpppaaswf fagsklrese rvtvethtkv |
| 30721 | akltiretti rdtgeytlel knvtgttset ikviildkpg pptgpikide idatsitisw |
| 30781 | eppeldggap lsgyvveqrd ahrpgwlpvs esvtrstfkf trltegneyv frvaatnrfg |
| 30841 | igsylqsevi ecrssiripg ppetlqifdv srdgmtltwy ppeddggsqv tgyiverkev |
| 30901 | radrwvrvnk vpvtmtryrs tgltegleye hrvtainarg sgkpsrpskp ivamdpiapp |
| 30961 | gkpqnprvtd ttrtsyslaw svpedeggsk vtgyliemqk vdqhewtkcn ttptkireyt |
| 31021 | lthlpqgaey rfrvlacnag gpgepaevpg tvkvtemley pdyelderyq egifvrqggv |
| 31081 | irltipikgk pfpickwtke gqdiskrami atsethtelv ikeadrgdsg tydlvlenkc |
| 31141 | gkkavyikvr vigspnspeg pleyddiqvr svrvswrppa ddggadilgy ilerrevpka |
| 31201 | awytidsrvr gtslvvkglk enveyhfrvs aenqfgiskp lkseepvtpk tpinppepps |
| 31261 | nppevldvtk ssvslswsrp kddggsrvtg yyierketst dkwvrhnktq itttmytvtg |
| 31321 | lvpdaeyqfr iiagndvgls etspasepvv ckdpfdkpsq pgeleilsis kdsvtlqwek |
| 31381 | pecdggkeil gywveyrqsg dsawkksnke rikdkqftig glleateyef rvfaenetgl |
| 31441 | srprrtamsi ktkltsgeap girkemkdvt tklgeaaqls cqivgrplpd ikwyrfgkel |
| 31501 | iqsrkykmss dgrthtltvm teeqedegvy tciatnevge vetssklllq atpqfhpgyp |
| 31561 | lkekyygavg stlrlhvmyi grpvpamtwf hgqkllqnse nitientehy thlvmknvqr |
| 31621 | kthagkykvq lsnvfgtvda ildveiqdkp dkptgpivie allknsavis wkppaddggs |
| 31681 | witnyvvekc eakegaewql vssaisvttc rivnltenag yyfrvsaqnt fgisdplevs |
| 31741 | svviikspfe kpgapgkpti tavtkdscvv awkppasdgg akirnyylek rekkqnkwis |
| 31801 | vtteeiretv fsvknliegl eyefrvkcen lggesewsei sepitpksdv piqaphfkee |
| 31861 | lrnlnvryqs natlvckvtg hpkpivkwyr qgkeiiadgl kyriqefkgg yhqliiasvt |
| 31921 | dddatvyqvr atnqggsysg taslevevpa kihlpktleg mgavhalrge vvsikipfsg |
| 31981 | kpdpvitwqk gqdlidnngh yqvivtrsft slvfpngver kdagfyvvca knrfgidqkt |
| 32041 | veldvadvpd pprgvkvsdv srdsvnltwt epasdggski tnyivekcat taerwlrvgq |
| 32101 | aretrytvin lfgktsyqfr viaenkfgls kpsepsepti tkedktramn ydeevdetre |
| 32161 | vsmtkashss tkelyekymi aedlgrgefg ivhrcvetss kktymakfvk vkgtdqvlvk |
| 32221 | keisilniar hrnilhlhes fesmeelvmi fefisgldif erintsafel nereivsyvh |
| 32281 | qvcealqflh shnighfdir peniiyqtrr sstikiiefg qarqlkpgdn frllftapey |
| 32341 | yapevhqhdv vstatdmwsl gtivyvllsg inpflaetnq qiienimnae ytfdeeafke |
| 32401 | isieamdfvd rllvkerksr mtasealqhp wlkqkiervs tkvirtlkhr ryyhtlikkd |
| 32461 | lnmvvsaari scggairsqk gvsvakvkva sieigpvsgq imhavgeegg hvkyvckien |
| 32521 | ydqstqvtwy fgvrglense kyeityedgv ailyvkditk lddgtyrckv vndygedssy |
| 32581 | aelfvkgvre vydyycrrtm kkikrrtdtm rllerppeft lplynktayv genvrfgvti |
| 32641 | tvhpephvtw yksgqkikpg dndkkytfes dkglyqltin svttdddaey tvvarnkyge |
| 32701 | dsckakltvt lhppptdstl rpmfkrllan aecqegqsvc feirvsgipp ptlkwekdgq |
| 32761 | plslgpniei ihegldyyal hirdtlpedt gyyrvtatnt agstscqahl gverlrykkq |
| 32821 | efkskeeher hvqkqidktl rmaeilsgte svpltqvake alreaavlyk pavstktvkg |
| 32881 | efrleieekk eerklrmpyd vpeprkykqt tieedqrikq fvpmsdmkwy kkirdqyemp |
| 32941 | gkldrvvqkr pkrirlsrwe qfyvmplpri tdqyrpkwri pklsqddlei vrparrrtps |
| 33001 | pdydfyyrpr rrslgdisde elllpiddyl amkrteeerl rleeelelgf sasppsrspp |
| 33061 | hfelsslrys spqahvkvee trkdfrysty hiptkaeast syaelrerha qaayrqpkqr |
| 33121 | qrimaerede ellrpvtttq hlseykseld fmskeeksrk ksrrqrevte iteieeeyei |
| 33181 | skhaqresss sasrllrrrr slsptyielm rpvselirsr pqpaeeyedd terrsptper |
| 33241 | trprspspvs serslsrfer sarfdifsry esmkaalktq ktserkyevl sqqpftldha |
| 33301 | pritlrmrsh rvpcgqntrf ilnvqskpta evkwyhngve lqesskihyt ntsgvltlei |
| 33361 | ldchtddsgt yravctnykg easdyatldv tggdyttyas qrrdeevprs vfpeltrtea |
| 33421 | yavssfkkts emeasssvre vksqmtetre slssyehsas aemksaalee ksleeksttr |
| 33481 | kikttlaari ltkprsmtvy egesarfscd tdgepvptvt wlrkgqvlst sarhqvtttk |
| 33541 | ykstfeissv qasdegnysv vvensegkqe aeftltiqka rvtekavtsp prvkspeprv |
| 33601 | kspeavkspk rvkspepshp kavsptetkp tptekvqhlp vsappkitqf lkaeaskeia |
| 33661 | kltcvvessv lrakevtwyk dgkklkengh fqfhysadgt yelkinnlte sdqgeyvcei |
| 33721 | sgeggtsktn lqfmgqafks ihekvskise tkksdqktte stvtrktepk apepisskpv |
| 33781 | ivtglqdttv ssdsvakfav katgeprpta iwtkdgkait qggkyklsed kggffleihk |
| 33841 | tdtsdsglyt ctvknsagsv sssckltika ikdteaqkvs tqktseitpq kkavvqeeis |
| 33901 | qkalrseeik mseaksqekl alkeeaskvl iseevkksaa tsleksivhe eitktsqase |
| 33961 | evrthaeika fstqmsineg grlvlkania gatdvkwvln gveltnseey rygvsgsdqt |
| 34021 | ltikqashrd egiltciskt kegivkcqyd ltlskelsda pafisqprsq ninegqnvlf |
| 34081 | tceisgepsp eiewfknnlp isissnvsis rsrnvyslei rnasysdsgk ytikaknfrg |
| 34141 | qcsataslmv lplveepsre vvlrtsgdts lqgsfssqsv qmsaskqeas fssfssssas |
| 34201 | smtemkfasm saqsmssmqe sfvemssssf mgisnmtqle sstskmlkag irgippkiea |
| 34261 | lpsdisideg kvltvacaft geptpevtws cggrkihsqe ggrfhientd dlttliimdv |
| 34321 | qkqdgglytl slgnefgsds atvnihirsi |

| HBA1 (e.g., GenBank AccessionNumber P69905 (SEQ ID NO: 2): | |
|---|---|
| 1 | mvlspadktn vkaawgkvga hageygaeal ermflsfptt ktyfphfdls hgsaqvkghg |
| 61 | kkvadaltna vahvddmpna lsalsdlhah klrvdpvnfk llshcllvtl aahlpaeftp |
| 121 | avhasldkfl asvstvltsk yr |

| Insulin-like growth factor 1 receptor (IGF1R) | |
|---|---|
| (e.g., GenBank Accession Number F08069 (SEQ ID NO: 3): | |
| 1 | mksgsgggsp tslwgllfls aalslwptsg eicgpgidir ndyqqlkrle nctviegylh |
| 61 | illiskaedy rsyrfpkltv iteylllfrv agleslgdlf pnltvirgwk lfynyalvif |
| 121 | emtnlkdigl ynlrnitrga irieknadlc ylstvdwsli ldavsnnyiv gnkppkecgd |
| 181 | lcpgtmeekp mcekttinne ynyrcwttnr cqkmcpstcg kractennec chpeclgscs |
| 241 | apdndtacva crhyyyagvc vpacppntyr fegwrcvdrd fcanilsaes sdsegfvihd |
| 301 | gecmqecpsg firngsgsmy cipcegpcpk vceeekktkt idsvtsaqml qgctifkgnl |
| 361 | linirrgnni aselenfmgl ievvtgyvki rhshalvsls flknlrlilg eeqlegnysf |
| 421 | yvldnqnlqq lwdwdhrnlt ikagkmyfaf npklcvseiy rmeevtgtkq rqskgdintr |
| 481 | nngerasces dvlhftsttt sknriiitwh ryrppdyrdl isftvyykea pfknvteydg |
| 541 | qdacgsnswn mvdvdlppnk dvepgillhg lkpwtqyavy vkavtltmve ndhirgakse |
| 601 | ilyirtnasv psipldvlsa snsssqlivk wnppslpngn lsyyivrwqr qpqdgylyrh |
| 661 | nycskdkipi rkyadgtidi eevtenpkte vcggekgpcc acpkteaekq aekeeaeyrk |
| 721 | vfenflhnsi fvprperkrr dvmqvanttm ssrsrnttaa dtynitdpee leteypffes |
| 781 | rvdnkertvi snlrpftlyr idihscnhea eklgcsasnf vfartmpaeg addipgpvtw |
| 841 | eprpensifl kwpepenpng lilmyeikyg sqvedqrecv srqeyrkygg aklnrlnpgn |
| 901 | ytariqatsl sgngswtdpv ffyvqaktgy enfihliial pvavllivgg lvimlyvfhr |
| 961 | krnnsrlgng vlyasvnpey fsaadvyvpd ewevarekit msrelgqgsf gmvyegvakg |
| 1021 | vvkdepetrv aiktvneaas mrerieflne asvmkefnch hvvrllgvvs qgqptlvime |
| 1081 | lmtrgdlksy lrslrpemen npvlappsls kmiqmageia dgmaylnank fvhrdlaarn |
| 1141 | cmvaedftvk igdfgmtrdi yetdyyrkgg kgllpvrwms peslkdgvft tysdvwsfgv |
| 1201 | vlweiatlae qpyqglsneq vlrfvmeggl ldkpdncpdm lfelmrmcwq ynpkmrpsfl |
| 1261 | eiissikeem epgfrevsfy yseenklpep eeldlepenm esvpldpsas ssslplpdrh |
| 1321 | sghkaengpg pgvlvlrasf derqpyahmn ggrkneralp lpgsstc |

| Isoform 3 of zonadhesin precursor | |
|---|---|
| (e.g., GenBank Accession Number Q9Y493-1 (SEQ ID NO: 4): | |
| 1 | mvppvwtlll lvgaalfrke kppdqklvvr ssrdnyvltq cdfeddakpl cdwsqvsadd |
| 61 | edwvrasgps ptgstgapgg ypngegsylh mesnsfhrgg varllspdlw eqgplcvhfa |
| 121 | hhmfglswga qlrllllsge egrrpdvlwk hwntqrpswm Ittvtvpagf tlptrlmfeg |
| 181 | trgstayldi aldalsirrg scnrvcmmqt csfdipndlc dwtwiptasg akwtqkkgss |
| 241 | gkpgvgpdgd fsspgsgcym lldpknarpg qkavllspvs lssgclsfsf hyilrgqspg |
| 301 | aalhiyasvl gsirkhtlfs gqpgpnwqav svnytavgri qfavvgvfgk tpepavavda |
| 361 | tsiapcgegf pqcdfednah pfcdwvqtsg dgghwalghk ngpvhgmgpa ggfpnagghy |
| 421 | iyleadefsh aggsvrlvsr pfcapgdicv efayhmyglg egtmlelllg spagsppipl |
| 481 | wkrvgsqrpy wqntsvtvps ghqqpmqlif kgiqgsntas vvamgfilin pqtcpvkvlp |
| 541 | elppvspvss tgpsettglt enptistkkp tvsiekpsvt tekptvpkek ptiptekpti |
| 601 | stekptipse kpnmpsekpt ipsekptilt ekptipsekp tipsekptis tekptvptee |
| 661 | pttpteettt smeepvipte kpsiptekps iptekptism eetiistekp tispekptip |
| 721 | tekptiptek stispekptt ptekptipte kptispekpt tptekptisp ekltiptekp |
| 781 | tiptekptip tekptistee pttpteetti stekpsipme kptlpteett tsveettist |
| 841 | ekltipmekp tistekptip tekptispek ltipteklti ptekptipie ettisteklt |
| 901 | iptekptisp ekptistekp tiptekptip teettistek ltiptekpti spekltipte |
| 961 | kptistekpt iptekltipt ekptiptekp tiptekltal rpphpsptat glaalvmsph |
| 1021 | apstpmtsvi lgttttsrss tercppnary escacpasck sprpscgplc regcvcnpgf |
| 1081 | lfsdnhciqa sscncfynnd yyepgaewfs pnctehcrcw pgsrvecqis qcgthtvcql |
| 1141 | kngqygchpy agtatclvyg dphyvtfdgr hfgfmgkcty ilaqpcgnst dpffrvtakn |
| 1201 | eeqgqegvsc lskvyvtlpe stvtllkgrr tlyggqqvtl paipskgvfl gasgrfvelq |
| 1261 | tefglrvrwd gdqqlyvtvs stysgklcgl cgnydgnsdn dhlkldgspa gdkeelgnsw |
| 1321 | qtdqdedqec qkyqvvnsps cdsslqssms gpgfcgrlvd thgpfetcll hvkaasffds |
| 1381 | cmldmcgfqg lqhllcthms tmtttcqdag havkpwreph fcpmacppns kyslcakpcp |
| 1441 | dtchsgfsgm fcsdrcveac ecnpgfvlsg leciprsqcg clhpagsyfk vgerwykpgc |
| 1501 | kelcvcesnn rircqpwrcr aqefcgqqdg iygchaqgaa tctasgdphy ltfdgalhhf |
| 1561 | mgtctyvltr pcwsrsqdsy fvvsatnenr ggilevsyik avhvtvfdls isllrgckvm |
| 1621 | lnghrvalpv wlaqgrvtir lssnlvllyt nfglqvrydg shlvevtvps syggqlcglc |
| 1681 | gnynnnsldd nlrpdrklag dsmqlgaawk lpessepgcf lvggkpsscq ensmadawnk |
| 1741 | ncailinpqg pfsqchqvvp pgssfascvh gqcgtkgdtt alcrslqaya slcaqagqap |
| 1801 | awrnrtfcpm rcppgssysp csspcpdtcs sinnprdcpk alpcaescec qkghilsgts |
| 1861 | cvplgqcgct dpagsyhpvg erwytentct rlctcsvhnn itcfqstckp nqicwaldgl |
| 1921 | lhcrasgvgv cqlpgeshyv sfdgsnhsip dactivlvkv chpamalplf kisakhekee |
| 1981 | ggteafrlhe vyidiydaqv tlqkghrvli nskqvtipai sqipgvsvks ssiytivnik |
| 2041 | igvqvkfdgn hlleieiptt yygkvcgmcg nfndeeedel mmpsdevans dsefvnswkd |
| 2101 | kdidpscqsl pvdeqqipae qgenpsgncr aadlrrarek ceaalrapvw aqcasridlt |
| 2161 | pflvdcantl cefgglyqal cqalqafgat cqsqglkppl wrnssfcple cpayssytnc |
| 2221 | lpscspscwd ldgrcegakv psacaegcic qpgyvlsedk cvprsqcgck dahggsiplg |
| 2281 | kswvssgcte kcvctggaiq cgdfrcpsgs hcqltsdnsn sncvsdkseq csvygdpryl |
| 2341 | tfdgfsyrlq grmtyvlikt vdvlpegvep llvegrnkmd pprssiflqe vittvygykv |
| 2401 | qlqaglelvv nnqkmavpyr pnehlrvtlr gqrlylvtdf elvvsfygrk navislpsmy |
| 2461 | eglvsglcgn ydknrkndmm lpsgaltqnl ntfgnswevk tedallrfpr aipaeeegqg |
| 2521 | aelglrtglq vsecspeqla snstqacrvl adpqgpfaac hqtvapepfq ehcvldlcsa |
| 2581 | qdpreqeelr cqvlsghgvs sryhiselyd tlpsilcqpg rprglrgplr grlrqhprlc |
| 2641 | lqwhpeppla dcgctsngiy yqlgssflte dcsqrctcas srillcepfs cragevctlg |
| 2701 | nhtqgcfpes pclqnpcqnd gqcreggatf tcecevgygg glcmeprdap pprkpasnlv |
| 2761 | gvllgllvpv vvvllavtre ciyrtrrkre ktqegdrlar lvdtdtvldc ac |

| latent transforming growth factor beta binding | |
|---|---|
| protein 4 (LTBP4) (e.g., GenBank Accession Number | |
| A6NCG8 (SEQ ID NO: 5): | |
| mplanhrdde hgvasmvsvh vehpqeasvv vhqvervsgp weeadaeava | 50 |
| raeaaaraea aapytvlaqs apredgyoda sgfgycfrel rggecasplp | 100 |
| glrtqevccr gaglawgvhd cqlcserlgn servsapdgp cptgfervng | 150 |
| scedvdecat ggrcqhgeca ntrggytcvc pdgflldssr sscisqhvis | 200 |
| eakgpcfrvl rdggcslpil rnitkqiccc srvgkawgrg cqlcppfgse | 250 |
| gfreicpagp gyhysasdlr yntrplgqep prvslsqprt lpatsrpsag | 300 |
| flpthrlepr peprpdprpg pelplpsipa wtgpeipesg pssgmcqrnp | 350 |
| qvcgpgrcis rpsgytcacd sgfrispqgt rcidvdecrr vpppcapgrc | 400 |
| enspgsfrcv cgpgfragpr aaecldvdec hrvpppcdlg rcentpgsfl | 450 |
| cvcpagyqaa phgascqdvd ectqspglcg rgacknlpgs frcvcpagfr | 500 |
| gsaceedvde caqepppcgp grcdntagsf hcacpagfrs rgpgapcqdv | 550 |
| decarspppc tygrcenteg sfqcvcpmgf qpntagsece dvdecenhla | 600 |
| cpgqecvnsp gsfqcrtcps ghhlhrgrct dvdecssgap pcgphghctn | 650 |
| tegsfrcsca pgyrapsgrp gpcadvnecl egdfcfphge clntdgsfac | 700 |
| tcapgyrpgp rgascldvde cseedlcqsg ictntdgsfe cicppghrag | 750 |
| pdlascldvd ecrergpalc gsqrcenspg syrcvrdcdp gyhagpegtc | 800 |
| ddvdecqeyg peicgaqrce ntpgsyrctp acdpgyqptp gggcqdvdec | 850 |
| rnrsfcgaha vcqnlpgsfq clcdqyegar dgrhcvdvne cetlqgvcga | 900 |
| alcenvegsf lcvcpnspee fdpmtgrcvp prtsagtfpg sqpqapaspv | 950 |
| lparpppppl prrpstprqg pvgsgrrecy fdtaapdacd nilarnvtwq | 1000 |
| eccctvgegw gsgcriqqcp gtetaeyqsl cphgrgylap sgdlslrrdv | 1050 |
| decqlfrdqv cksgvcvnta pgyscycsng yyyhtqrlec idndecadee | 1100 |
| paceggrcvn tvgsyhctce pplvldgsqr rcvsnesqsl ddnlgvcwqe | 1350 |
| vgadlvcshp rldrqatyte ccclygeawg mdcalcpaqd sddfealcnv | 1200 |
| lrppaysppr pggfglpyey gpdlgppyqg lpygpelypp palpydpypp | 1250 |
| ppgpfarrea pygaprfdmp dfeddggpyg eseapappgp gtrwpyrsrd | 1300 |
| trrsfpepee ppeggsyags laepyeelea eecgildgct ngrcvrvpeg | 1350 |
| ftcrcfdgyr ldmtrmacvd inecdeaeaa splcvnarcl ntdgsfrcic | 1400 |
| rpgfapthqp hhcaparpra | 1420 |

| ASXL1 (additional sex combs like 1) (e.g., GenBank Accession | |
|---|---|
| Number Q8IXJ9-1 (SEQ ID NO: 6): | |
| 1 | mkdkqkkkke rtwaeaarlv lenysdapmt pkqilqviea eglkemrsgt splaclnaml |
| 61 | hsnsrggegl fyklpgrisl ftlkkdalqw srhpatvege epedtadves cgsneastvs |
| 121 | gendvsldet ssnascstes qsrplsnprd syrassgank qkkktgvmlp rvvltplkvn |
| 181 | gahvesasgf sgchadgesg spsssssgsl algsaairgq aevtqdpapl lrgfrkpatg |
| 241 | qmkrnrgeei dfetpgsilv ntnlralins rtfhalpshf qqqllfllpe vdrqvgtdgl |
| 301 | lrlsssalnn effthaaqsw rerladgeft hemqvrirqe mekekkveqw kekffedyyg |
| 361 | qklgltkees lqqnvgqeea eiksglcvpg esvriqrgpa trqrdghfkk rsrpdlrtra |
| 421 | rrnlykkqes eqagvakdak svasdvplyk dgeaktdpag lssphlpgts saapdlegpe |
| 481 | fpvesvasri qaepdnlara saspdripsl pgetvdqepk dqkrksfeqa asasfpekkp |
| 541 | rledrqsfrn tiesvhtekp qptkeepkvp piriqlsrik ppwvvkgqpt yqicpriipt |
| 601 | tesscrgwtg artladikar alqvrgargh hchreaatta igggggpggg gggatdeggg |
| 661 | rgsssgdgge acghpeprgg pstpgkctsd lqrtqllppy plngehtqag tamsrarred |
| 721 | lpslrkeesc llqratvglt dglgdasqlp vaptgdqpcq alpllssqts vaerlveqpq |
| 781 | lhpdvrtece sgttswesdd eeqgptvpad ngpipslvgd dtlekgtgqa ldshptmkdp |
| 841 | vnvtpsstpe ssptdclqnr afddelglgg scppmresdt rgenlktkal vsnsslhwip |
| 901 | ipsndevvkq pkpesrehip svepqvgeew ekaaptppal pgdltaeegl dpldsltslw |
| 961 | tvpsrggsds ngsycqqvdi eklkingdse alsphgestd tasdfeghlt edsseadtre |
| 1021 | aavtkgssvd kdekpnwnqs aplskvngdm rlvtrtdgmv apqswvsrvc avrqkipdsl |
| 1081 | llasteyqpr avclsmpgss veatnplvmq llqgslplek vlppanddsm sespqvpltk |
| 1141 | dqshgslrmg slhglgknsg mvdgsspssl ralkepllpd scetgtglar ieatqapgap |
| 1201 | qknckavpsf dslhpvtnpi tssrkleemd skeqfssfsc edqkevrams qdsnsnaapg |
| 1261 | kspgdlttsr tprfsspnvi sfgpeqtgra lgdqsnvtgq gkklfgsgnv aatlqrprpa |
| 1321 | dpmplpaeip pvfpsgklgp stnsmsggvq tpredwapkp hafvgsvkne ktfvggplka |
| 1381 | naenrkatgh splelvghle gmpfvmdlpf wklprepgkg lseplepssl paqlsikqaf |
| 1441 | yqklsklqls stsfnyssss ptfpkglags vvqlshkanf gashsaslsl qmftdsstve |
| 1501 | sislqcacsl kamimcqgcg afchddcigp sklcvlclvv r |

| beta globin (BBB) (e.g., GenBank Accession Number P68871 | |
|---|---|
| (SEQ ID NO: 7): | |
| 1 | mvhltpeeks avtalwgkvn vdevggealg rllvvypwtq rffesfgdls tpdavmgnpk |
| 61 | vkahgkkvlg afsdglahld nlkgtfatls elhcdklhvd penfrllgnv lvcvlahhfg |
| 121 | keftppvqaa yqkvvagvan alahkyh |

| BMP15-bone morphogenetic protein (e.g., GenBank Accession Number NM_005448.1 | |
|---|---|
| (see also, UniProt Accession Number O95972) (SEQ ID NO: 8): | |
| 1 | mvllsilril flcelvlfme hraqmaeggq ssiallaeap tlplieelle espgeqprkp |
| 61 | rllghslrym lelyrrsads hghprenrti gatmvrlvkp ltnvarphrg twhiqilgfp |
| 121 | lrpnrglyql vratvvyrhh lqltrfnlsc hvepwvqknp tnhfpssegd sskpslmsna |
| 181 | wkemditqlv qqrfwnnkgh rilrlrfmcq qqkdsgglel whgtssldia flllyfndth |
| 241 | ksirkakflp rgmeefmere sllrrtrqad gisaevtass skhsgpennq cslhpfqisf |
| 301 | rqlgwdhwii appfytpnyc kgtclrvlrd glnspnhaii qnlinqlvdq svprpscvpy |
| 361 | kyvpisvlmi eangsilyke yegmiaesct cr |

| TRIM49 (also known as RNF18; tripartite motif-containing 49) | |
|---|---|
| (e.g., GenBank Accession Number Q9NS80 (SEQ ID NO: 9): | |
| 1 | mnsgilqvfq gelicplcmn yfidpvtidc ghsfcrpcfy lnwqdipflv qcsectkste |
| 61 | qinlktnihl kkmaslarkv slwlflssee qmcgthretk kifcevdrsl lcllcsssqe |
| 121 | hryhrhrpie waaeehrekl lqkmqslwek acenhrnlnv ettrtrcwkd yvnlrleair |
| 181 | aeyqkmpafh heeekhnlem lkkkgkeifh rlhlskakma hrmeilrgmy eelnemchkp |
| 241 | dvellqafgd ilhrsesvll hmpqplnpel sagpitglrd rlngfrvhit lhheeanndi |
| 301 | flyeilrsmc igcdhqdvpy ftatprsfla wgvqtftsgk yywevhvgds wnwafgvcnm |
| 361 | yrkeknqnek idgkaglfll gcvkndiqcs lfttsplmlq yipkptsrvg lfldceaktv |
| 421 | sfvdvnqssl iytipncsfs pplrpifcci hf |

| DNAJ homolog subfamily B member 11 precursor (e.g., GenBank Accession | |
|---|---|
| Number Q9UBS4 (SEQ ID NO: 10): | |
| 1 | mapqnlstfc llllyligav iagrdfykil gvprsasikd ikkayrklal qlhpdrnpdd |
| 61 | pqaqekfqdl gaayevlsds ekrkqydtyg eeglkdghqs shgdifshff gdfgfmfggt |
| 121 | prqqdrnipr gsdiivdlev tleevyagnf vevvrnkpva rqapgkrkcn crqemrttql |
| 181 | gpgrfqmtqe vvcdecpnvk lvneertlev eiepgvrdgm eypfigegep hvdgepgdlr |
| 241 | frikvvkhpi ferrgddlyt nvtislvesl vgfemdithl dghkvhisrd kitrpgaklw |
| 301 | kkgeglpnfd nnnikgslii tfdvdfpkeq lteearegik qllkqgsvqk vynglqgy |

| uncharacterized hematopoietic stem/progenitor cells protein MDS027 | |
|---|---|
| (also known as MDS027 hHBrk1 HSPC300) (e.g., GenBank Accession Number | |
| Q9NZ47(SEQ ID NO: 11): | |
| 1 | mrgidtpsdr kkslkmslqa kwgpgldlsk strnwwvsnn ilwqphcqgm svltrtaphf |
| 61 | ppkvgrrqrl fteavqrq |

| uncharacterized protein ALB (e.g., GenBank Accession Number | |
|---|---|
| A6NBZ8 (SEQ ID NO: 12): | |
| mkwvtfisll flfssaysrg vfrrdahkse vahrfkdlge enfkalvlia | 50 |
| fagylqqcpf edhvklvnev tefaktcvad esaencdksl htlfgdklct | 100 |
| vatlretyge madccakqep ernecflqhk ddnpnlprlv rpevdvmcta | 150 |
| fhdneetflk kylyeiarrh pyfyapellf fakrykaaft eccqaadkaa | 200 |
| cllpkldelr degkassakq rlkcaslqkf gerafkawav arlsqrfpka | 250 |
| efaevsklvt dltkvhtecc hgdllecadd radlakyice nqdsissklk | 300 |
| eccekpllek shciaevend empadlpsla adfveskdvc knyaeakdvf | 350 |
| lgmflyeyar rhpdysvvll lrlaktyett lekccaaadp hecyakvfde | 400 |
| fkplveepqn likqncelfe qlgeykfqna llvrytkkvp qvstptlvev | 450 |
| srnlgkvgsk cckhpeakrm pcaedylsvv lnqlcvlhek tpvsdrvtkc | 500 |
| cteslvnrrp cfsalevdet yvpkefnaet ftfhadictl sekerqikkq | 550 |
| talvelvkhk pkatkeqlka vmddfaafve kcckaddket cfaeegqktc | 600 |
| cckssclrli tshlkasqpt mrirerk | 627 |

| isoform 3 of sushi, nidogen and EGF-like domain-containing protein 1 | |
|---|---|
| precursor (e.g., GenBank Accession Number Q8TER0-4 (SEQ ID NO: 13): | |
| 1 | mrhgvawall vaaalglgar gvrgavalad fypfgaergd avtpkqddgg sglrplsvpf |
| 61 | pffgaehsgl yvnnngiisf lkevsqftpv afpiakdrcv vaafwadvdn rragdvyyre |
| 121 | atdpamlrra tedvrhyfpe lldfnatwvf vatwyrvtff ggsssspvnt fqtvlitdgk |
| 181 | lsftifnyes ivwttgthas sggnatglgg iaaqagfnag dgqryfsipg srtadmaeve |
| 241 | tttnvgvpgr wafriddaqv rvggcghtts vclalrpcln ggkciddcvt gnpsytcscl |
| 301 | sgftgrrchl dvnecasqpc qnggtcthgi nsfrcqcpag fggptcetaq spcdtkecqh |
| 361 | ggqcqvengs avcvcqagyt gaacemdvdd cspdpclngg scvdlvgnyt clcaepfkgl |
| 421 | rcetgdhpvp daclsapchn ggtcvdadqg yvcecpegfm gldcrervpd dcecrnggrc |
| 481 | lganttlcqc plgffgllce feitampcnm ntqcpdggyc mehggsylcv chtdhnashs |
| 541 | lpspcdsdpc fnggscdahd dsytcecprg fhgkhcekar phlcssgpcr nggtckeagg |
| 601 | eyhcscpyrf tgrhceigkp dscasgpchn ggtcfhyigk ykcdcppgfs grhceiapsp |
| 661 | cfrspcvngg tcedrdtdff chcqagymgr rcqaevdcgp peevkhatlr fngtrlgava |
| 721 | lyacdrgysl sapsrirvcq phgvwseppq cleidecrsq pclhggscqd rvagylclcs |
| 781 | tgyegahcel erdecrahpc rnggscrnlp gayvcrcpag fvgvhcetev dacdsspcqh |
| 841 | ggrcesggga ylcvcpesff gyhcetvsdp cfsspcggrg yclasngshs ctckvgytge |
| 901 | dcakelfppt alkmervees gvsiswnppn gpaarqmldg yavtyvssdg syrrtdfvdr |
| 961 | trsshqlqal aagraynisv fsvkrnsnnk ndisrpavll artrprpveg fevtnvtast |
| 1021 | isvqwalhri rhatvsgvrv sirhpealrd qatdvdrsvd rftfrallpg krytiqlttl |
| 1081 | sglrgeehpt eslatapthv wtrplppanl taarvtatsa hvvwdaptpg slleayvinv |
| 1141 | ttsqstksry vpngklasyt vrdllpgrry qlsviavqst elgpqhsepa hlyiitsprd |
| 1201 | gadrrwhqgg hhprvlknrp pparlpelrl lndhsapetp tqpprfselv dgrgrvsarf |
| 1261 | ggspskaatv rsqptasaql enmeeapkrv slalqlpehg skdignvpgn csenpcqngg |
| 1321 | tcvpgadahs cdcgpgfkgr rcelacikvs rpctrlfset kafpvweggv chhvykrvyr |
| 1381 | vhqdicfkes cestslkktp nrkqsksqtl eks |

| isoform 2 of peripherin (e.g., GenBank Accession Number P41219-2 | |
|---|---|
| (SEQ ID NO: 14): | |
| 1 | mshhpsglra gfsstsyrrt fgpppslspg afsyssssrf sssrllgsas psssvrlgsf |
| 61 | rspragagal lrlpserldf smaealnqef latrsnekqe lqelndrfan fiekvrfleq |
| 121 | qnaalrgels qargqepara dqlcqqelre lrrelellgr erdrvqverd glaedlaalk |
| 181 | qrleeetrkr edaehnlvlf rkdvddatls rlelerkies lmdeieflkk lheeelrdlq |
| 241 | vsvesqqvqq veveatvkpe ltaalrdira qyesiaaknl qeaeewyksk yadlsdaanr |
| 301 | nhealrqakq emnesrrqiq sltcevdglr gtneallrql releeqfale aggyqagaar |
| 361 | leeelrqlke emarhlreyq ellnvkmald ieiatyrkll egeesrisvp vhsfaslnik |
| 421 | ttvpeveppq dshsrktvli ktietrngev vtesqkeqrs eldkssahsy |

| mitochondrial 28S ribosomal protein S22 (e.g., GenBank Accession | |
|---|---|
| Number P82650 (SEQ ID NO: 15): | |
| 1 | maplgttvll wsllrsspgv ervcfrariq pwhggllqpl pcsfemglpr rrfsseaaes |
| 61 | gspetkkptf mdeevqsilt kmtglnlqkt fkpaiqelkp ptyklmtqaq leeatrqave |
| 121 | aakvrlkmpp vleervpind vlaedkileg tettkyvftd isysiphrer fivvrepsgt |
| 181 | lrkasweerd rmiqvyfpke grkiltpiif keenlrtmys qdrhvdvlnl cfagfepdst |
| 241 | eyikvhhkty edidkrgkyd llrstryfgg mvwyfvnnkk idgllidqiq rdliddatnl |
| 301 | vqlyhvlhpd gqsaqgakdq aaeginlikv fakteaqkga yieltlqtyq ealsrhsaas |

| translation initiation factor EIF-2B subunit epsilon (e.g., GenBank | |
|---|---|
| Accession Number Q13144 (SEQ ID NO: 16): | |
| 1 | maapvvappg vvvsrankrs gagpggsggg gargaeeepp pplqavlvad sfdrrffpis |
| 61 | kdqprvllpl anvalidytl efltatgvqe tfvfccwkaa qikehllksk wcrptslnvv |
| 121 | riitselyrs lgdvlrdvda kalvrsdfll vygdvisnin itraleehrl rrkleknvsv |
| 181 | mtmifkessp shptrchedn vvvavdsttn rvlhfqktqg lrrfafplsl fqgssdgvev |
| 241 | rydlldchis icspqvaqlf tdnfdyqtrd dfvrgllvne eilgnqihmh vtakeygarv |
| 301 | snlhmysavc advirrwvyp ltpeanftds ttqscthsrh niyrgpevsl ghgsileenv |
| 361 | llgsgtvigs ncfitnsvig pgchigdnvv ldqtylwqgv rvaagaqihq sllcdnaevk |
| 421 | ervtlkprsv ltsqvvvgpn itlpegsvis lhppdaeede ddgefsddsg adqekdkvkm |
| 481 | kgynpaevga agkgylwkaa gmnmeeeeel qqnlwglkin meeesesese qsmdseepds |
| 541 | rggspqmddi kvfqnevlgt lqrgkeenis cdnlvleins lkyaynislk evmqvlshvv |
| 601 | lefplqqmds pldssrycal llpllkawsp vfrnyikraa dhlealaaie dfflehealg |
| 661 | ismakvlmaf yqleilaeet ilswfsqrdt tdkgqqlrkn qqlqrfiqwl keaeeessed |
| 721 | d |

| estradiol 17-beta-dehydrogenase 1 (e.g., GenBank Accession Number | |
|---|---|
| P14061 (SEQ ID NO: 17): | |
| 1 | martvvlitg cssgiglhla vrlasdpsqs fkvyatlrdl ktqgrlweaa ralacppgsl |
| 61 | etlqldvrds ksvaaarerv tegrvdvlvc naglgllgpl ealgedavas vldvnvvgtv |
| 121 | rmlqaflpdm krrgsgrvlv tgsvgglmgl pfndvycask faleglcesl avlllpfgvh |
| 181 | lsliecgpvh tafmekvlgs peevldrtdi htfhrfyqyl ahskqvfrea aqnpeevaev |
| 241 | fltalrapkp tlryftterf lpllrmrldd psgsnyvtam hrevfgdvpa kaeagaeagg |
| 301 | gagpgaedea grsavgdpel gdppaapq |

| XRCC6BP1 (e.g., GenBank Accession Number Q8N4L5 (SEQ ID NO: 18): | |
|---|---|
| 1 | magapderrr gpaageqlqq qhvscqvfpe rlaqgnpqqg ffssfftcnq kcqlrllktl |
| 61 | etsrshdlea vvpqngsetg warkglgntw pgasgsaqsl drlgimgagl ga |

| brain-specific angiogenesis inhibitor 1 precursor (e.g., GenBank | |
|---|---|
| Accession Number O14514(SEQ ID NO: 19): | |
| 1 | mrgqaaapgp vwilapllll llllgrrara aagadagpgp epcatlvqgk ffgyfsaaav |
| 61 | fpanasrcsw tlrnpdprry tlymkvakap vpcsgpgrvr tyqfdsfles trtylgvesf |
| 121 | devlrlcdps aplaflqask qflqmrrqqp pqhdglrpra gppgptddfs veylvvgnrn |
| 181 | psraacqmlc rwldaclags rsshpcgimq tpcaclggea ggpaagplap rgdvclrdav |
| 241 | aggpenclts ltqdrgghga tggwklwslw gectrdcggg lqtrtrtclp apgvegggce |
| 301 | gvleegrqcn reacgpagrt ssrsqslrst darrreelgd elqqfgfpap qtgdpaaeew |
| 361 | spwsvcsstc gegwqtrtrf cvsssystqc sgplreqrlc nnsavcpvhg awdewspwsl |
| 421 | csstcgrgfr drtrtcrppq fggnpcegpe kqtkfcnial cpgravdgnw newsswsacs |
| 481 | ascsqgrqqr trecngpsyg gaecqghwve trdcflqqcp vdgkwqawas wgscsvtcga |
| 541 | gsqrrervcs gpffggaacq gpqdeyrqcg tqrcpephei cdednfgavi wketpageva |
| 601 | avrcprnatg lilrrcelde egiayweppt yircvsidyr niqmmtrehl akaqrglpge |
| 661 | gvseviqtlv eisqdgtsys gdllstidvl rnmteifrra yysptpgdvq nfvqilsnll |
| 721 | aeenrdkwee aqlagpnake lfrlvedfvd vigfrmkdlr dayqvtdnlv lsihklpasg |
| 781 | atdisfpmkg wratgdwakv pedrvtvsks vfstgltead easvfvvgtv lyrnlgsfla |
| 841 | lqrnttvlns kvisvtvkpp prslrtplei efahmyngtt nqtcilwdet dvpsssappq |
| 901 | lgpwswrgcr tvpldalrtr clcdrlstfa ilaqlsadan mekatlpsvt livgcgvssl |
| 961 | tllmlviiyv svwryirser svilinfcls iissnalili gqtqtrnkvm ctlvaaflhf |
| 1021 | fflssfcwvl teawqsymav tghlrnrlir krflclgwgl palvvaisvg ftkakgystm |
| 1081 | nycwlslegg llyafvgpaa avvlvnmvig ilvfnklvsk dgitdkklke ragaslwssc |
| 1141 | vvlpllaltw msavlavtdr rsalfqilfa vfdslegfvi vmvhcilrre vqdavkcrvv |
| 1201 | drqeegngds ggsfqnghaq lmtdfekdvd lacrsvlnkd iaacrtatit gtlkrpslpe |
| 1261 | eeklklahak gpptnfnslp anvsklhlhg sprypggplp dfpnhsltlk rdkapkssfv |
| 1321 | gdgdifkkld selsraqeka ldtsyvilpt atatlrpkpk eepkysihid qmpqtrlihl |
| 1381 | stapeaslpa rsppsrqpps ggppeappaq pppppppppp ppqqplpppp nlepappslg |
| 1141 | dpgepaahpg pstgpstkne nvatlsvssl errksryael dfekimhtrk rhqdmfqdln |
| 1501 | rklqhaaekd kevlgpdskp ekqqtpnkrp weslrkahgt ptwvkkelep lqpsplelrs |
| 1561 | vewersgati plvgqdiidl qtev |

| isoform 2 of ring finger and CCCH-type zinc finger domain-containing | |
|---|---|
| protein 2 (e.g., GenBank Accession Number Q9HBD1-2 (SEQ ID NO: 20): | |
| 1 | mpvqaaqwte flscpicyne fdenvhkpis lgcshtvckt clnklhrkac pfdqtaintd |
| 61 | idvlpvnfal lqlvgaqvpd hqsiklsnlg enkhyevakk cvedlalylk plsggkyvas |
| 121 | lnqsalsrpm qrklvtlvnc qlveeegrvr amraarslge rtvtelilqh qnpqqlsanl |
| 181 | waavrargcq flgpamqeea lklvllaled gsalsrkvlv lfvvqrlepr fpqasktsig |
| 241 | hvvqllyras cfkvtkrded sslmqlkeef rsyealrreh daqivhiame aglrispeqw |
| 301 | ssllygdlah kshmqsiidk lqspesfaks vqeltivlqr tgdpanlnrl rphlellani |
| 361 | dpnpdavspt weqlenamva vktvvhglvd fiqnysrkgh etpqpqpnsk yktsmcrdlr |
| 421 | qqggcprgtn ctfahsqeel ekyrlrnkki natvrtfpll nkvgvnntvt ttagnvisvi |
| 481 | gstettgkiv pstngisnae nsvsqlisrs tdstlralet vkkvgkvgan gqnaagpsad |
| 541 | svtenkigsp pktpvsnvaa tsagpsnvgt elnsvpqkss pfltrvpvyp phseniqyfq |
| 601 | dprtqipfev pqypqtgyyp ppptvpagva pcvprfvrsn nvpesslppa smpyadhyst |
| 661 | fsprdrmnss pyqppppqpy gpvppvpsgm yapvydsrri wrppmyqrdd iirsnslppm |
| 721 | dvmhssvyqt slrerynsld gyysvacqpp seprttvplp repcghlkts ceeqirrkpd |
| 781 | qwaqyhtqka plvsstlpva tqsptppspl fsvdfradfs esvsgtkfee dhlshyspws |
| 841 | cgtigscina idsepkdvia nsnavlmdld sgdvkrrvhl fetqrrtkee dpiipfsdgp |
| 901 | iiskwgaisr ssrtgyhttd pvqatasqgs atkpisvsdy vpyvnavdsr wssygneats |
| 961 | sahyverdrf ivtdlsghrk hsstgdllsl elqqaksnsl llqreanala mqqkwnslde |
| 1021 | grhltlnlls keielrngel qsdytedatd tkpdrdiele lsaldtdepd gqsepieeil |
| 1081 | diqlgissqn dqllngmave nghpvqqhqk eppkqkkqsl gedhvileeq ktilpvtscf |
| 1141 | sqplpvsisn asclpittsv sagnlilkth vmsedkndfl kpvangkmvn s |

| hemoglobin subunit beta (e.g., GenBank Accession Number P68871 | |
|---|---|
| (SEQ ID NO: 21): | |
| 1 | mvhltpeeks avtalwgkvn vdevggealg rllvvypwtq rffesfgdls tpdavmgnpk |
| 61 | vkahgkkvlg afsdglahld nlkgtfatls elhcdklhvd penfrllgnv lvcvlahhfg |
| 121 | keftppvqaa yqkvvagvan alahkyh |

| isoform 1 of far upstream element-binding protein 1 (e.g., GenBank | |
|---|---|
| Accession Number Q96AE4-1 (SEQ ID NO: 22): | |
| 1 | madystvppp ssgsaggggg ggggggvnda fkdalqrarq iaakiggdag tslnsndygy |
| 61 | ggqkrpledg dqpdakkvap qndsfgtqlp pmhqqqsrsv mteeykvpdg mvgfiigrgg |
| 121 | egisriqqes gckiqiapds gglperscml tgtpesvqsa krlldqivek grpapgfhhg |
| 181 | dgpgnavqei mipaskaglv igkggetikq lqeragvkmv miqdgpqntg adkplritgd |
| 241 | pykvqqakem vlelirdqgg frevrneygs riggnegidv piprfavgiv igrngemikk |
| 301 | iqndagvriq fkpddgttpe riaqitgppd rcqhaaeiit dllrsvqagn pggpgpggrg |
| 361 | rgrgqgnwnm gppgglqefn fivptgktgl iigkggetik sisqqsgari elqrnpppna |
| 421 | dpnmklftir gtpqqidyar qlieekiggp vnplgppvph gphgvpgphg ppgppgpgtp |
| 481 | mgpynpapyn pgppgpaphg ppapyapqgw gnayphwqqq appdpakagt dpnsaawaay |
| 541 | yahyyqqqaq pppaapagap tttqtngqgd qqnpapagqv dytkaweeyy kkmgqavpap |
| 601 | tgappggqpd ysaawaeyyr qqaayyaqts pqgmpqhppa pqgq |

| GALECTIN-3 (e.g., GenBank Accession Number P17931 (SEQ ID NO: 23): | |
|---|---|
| 1 | madnfslhda lsgsgnpnpq gwpgawgnqp agaggypgas ypgaypgqap pgaypgqapp |
| 61 | gayhgapgay pgapapgvyp gppsgpgayp ssggpsapga ypatgpygap agplivpynl |
| 121 | plpggvvprm litilgtvkp nanrialdfq rgndvafhfn prfnennrry ivcntkldnn |
| 181 | wgreergsvf pfesgkpfki qvlvepdhfk vavndahllq ynhrvkklne isklgisgdi |
| 241 | dltsasytmi |

| lysozyme C precursor (e.g., GenBank Accession Number P61626 (SEQ ID NO: 24): | |
|---|---|
| 1 | mkalivlglv llsvtvqgkv fercelartl krlgmdgyrg islanwmcla kwesgyntra |
| 61 | tnynagdrst dygifqinsr ywcndgktpg avnachlscs allqdniada vacakrvvrd |
| 121 | pqgirawvaw rnrcqnrdvr qyvqgcgv |

| actin, alpha skeletal muscle (e.g., GenBank Accession Number | |
|---|---|
| P68133 (SEQ ID NO: 25): | |
| 1 | mcdedettal vcdngsglvk agfagddapr avfpsivgrp rhqgvmvgmg qkdsyvgdea |
| 61 | qskrgiltlk ypiehgiitn wddmekiwhh tfynelrvap eehptlltea plnpkanrek |
| 121 | mtqimfetfn vpamyvaiqa vlslyasgrt tgivldsgdg vthnvpiyeg yalphaimrl |
| 181 | dlagrdltdy lmkiltergy sfvttaerei vrdikeklcy valdfenema taasssslek |
| 241 | syelpdgqvi tignerfrcp etlfqpsfig mesagihett ynsimkcdid irkdlyannv |
| 301 | msggttmypg iadrmqkeit alapstmkik iiapperkys vwiggsilas lstfqqmwit |
| 361 | kqeydeagps ivhrkcf |

| isoform M2 of pyruvate kinase isozymes M1/M2 (e.g., GenBank Accession | |
|---|---|
| Number P14618-1 (SEQ ID NO: 26): | |
| 1 | mskphseagt afiqtqqlha amadtflehm crldidsppi tarntgiict igpasrsvet |
| 61 | lkemiksgmn varlnfshgt heyhaetikn vrtatesfas dpilyrpvav aldtkgpeir |
| 121 | tglikgsgta evelkkgatl kitldnayme kcdenilwld yknickvvev gskiyvddgl |
| 181 | islqvkqkga dflvteveng gslgskkgvn lpgaavdlpa vsekdiqdlk fgveqdvdmv |
| 241 | fasfirkasd vhevrkvlge kgknikiisk ienhegvrrf deileasdgi mvargdlgie |
| 301 | ipaekvflaq kmmigrcnra gkpvicatqm lesmikkprp traegsdvan avldgadcim |
| 361 | lsgetakgdy pleavrmqhl iareaeaaiy hlqlfeelrr lapitsdpte atavgaveas |
| 421 | fkccsgaiiv ltksgrsahq varyrprapi iavtrnpqta rqahlyrgif pvlckdpvqe |
| 481 | awaedvdlry nfamnvgkar gffkkgdvvi vltgwrpqsg ftntmrvvpv p |

| AGR2 (e.g., GenBank Accession Number O95994 (SEQ ID NO: 27): | |
|---|---|
| 1 | mekipvsafl llvalsytla rdttvkpgak kdtkdsrpkl pqtlsrgwgd qliwtqtyee |
| 61 | alyksktsnk plmiihhlde cphsqalkkv faenkeiqkl aeqfvllnlv yettdkhlsp |
| 121 | dgqyvprimf vdpsltvrad itgrysnrly ayepadtall ldnmkkalkl lktel |

| neutrophil defensin 1 precursor (e.g., GenBank Accession Number | |
|---|---|
| P59665 (SEQ ID NO: 28); | |
| 1 | mrtlailaai llvalqaqae plqaradeva aapeqiaadi pevvvslawd eslapkhpgs |
| 61 | rknmacycri paciagerry gtciyqgrlw afcc |

| myeloblastin precursor (e.g., GenBank Accession Number | |
|---|---|
| P24158 (SEQ ID NO: 29): | |
| 1 | mahrppspal asvllallls gaaraaeivg gheaqphsrp ymaslqmrgn pgshfcggtl |
| 61 | ihpsfvltaa hclrdipqrl vnvvlgahnv rtqeptqqhf svaqvflnny daenklndvl |
| 121 | liqlsspanl sasvatvqlp qqdqpvphgt qclamgwgrv gahdppaqvl qelnvtvvtf |
| 181 | fcrphnictf vprrkagicf gdsggplicd giiqgidsfv iwgcatrlfp dfftrvalyv |
| 241 | dwirstlrrv eakgrp |

| uncharacterized protein PSME2 (e.g., GenBank Accession Number | |
|---|---|
| Q9UL46 (SEQ ID NO: 30): | |
| makpcgvrls gearkqvevf rqnlfgeaee flyrflpqki iylnqllqed | 50 |
| slnvadltsl rapldipipd pppkddemet dkqekkevpk cgflpgnekv | 100 |
| lsllalvkpe vwtlkekcil vitwiqhlip kiedgndfgv aiqekvlerv | 150 |
| navktkveaf qttiskyfse rgdavakask ethvmdyral vherdeaayg | 200 |
| elramvldlr afyaelyhii ssnlekivnp kgeekpsmy | 239 |

| tubulin beta-2C chain (e.g., GenBank Accession Number | |
|---|---|
| P68371 (SEQ ID NO: 31): | |
| 1 | mreivhlqag qcgnqigakf wevisdehgi dptgtyhgds dlqlerinvy yneatggkyv |
| 61 | pravlvdlep gtmdsvrsgp fgqifrpdnf vfgqsgagnn wakghytega elvdsvldvv |
| 121 | rkeaescdcl qgfqlthslg ggtgsgmgtl liskireeyp drimntfsvv pspkvsdtvv |
| 181 | epynatlsvh qlventdety cidnealydi cfrtlklttp tygdlnhlvs atmsgvttcl |
| 241 | rfpgqlnadl rklavnmvpf prlhffmpgf apltsrgsqq yraltvpelt qqmfdaknmm |
| 301 | aacdprhgry ltvaavfrgr msmkevdeqm lnvqnknssy fvewipnnvk tavcdipprg |
| 361 | lkmsatfign staiqelfkr iseqftamfr rkaflhwytg egmdemefte aesnmndlvs |
| 421 | eyqqyqdata eeegefeeea eeeva |

| thiosulfate sulfurtransferase (e.g., GenBank Accession Number | |
|---|---|
| Q16762 (SEQ ID NO: 32): | |
| 1 | mvhqvlyral vstkwlaesi rtgklgpglr vldaswyspg trearkeyle rhvpgasffd |
| 61 | ieecrdtasp yemmlpseag faeyvgrlgi snhthvvvyd gehlgsfyap rvwwmfrvfg |
| 121 | hrtvsvlngg frnwlkeghp vtsepsrpep avfkatldrs llktyeqvle nleskrfqlv |
| 181 | dsrsqgrflg tepepdavgl dsghirgavn mpfmdflted gfekgpeelr alfqtkkvdl |
| 241 | sqpliatcrk gvtachvala aylcgkpdva vydgswsewf rrappesrvs qgkseka |

| heat shock 70 kDa protein 1 (e.g., GenBank Accession Number | |
|---|---|
| P08107 (SEQ ID NO: 33): | |
| 1 | makaaaigid lgttyscvgv fqhgkveiia ndqgnrttps yvaftdterl igdaaknqva |
| 61 | lnpqntvfda krligrkfgd pvvqsdmkhw pfqvindgdk pkvqvsykge tkafypeeis |
| 121 | smvltkmkei aeaylgypvt navitvpayf ndsqrqatkd agviaglnvl riineptaaa |
| 181 | iaygldrtgk gernvlifdl gggtfdvsil tiddgifevk atagdthlgg edfdnrlvnh |
| 241 | fveefkrkhk kdisqnkrav rrlrtacera krtlssstqa sleidslfeg idfytsitra |
| 301 | rfeelcsdlf rstlepveka lrdakldkaq ihdlvlvggs tripkvqkll qdffngrdln |
| 361 | ksinpdeava ygaavqaail mgdksenvqd lllldvapls lgletaggvm talikrnsti |
| 421 | ptkqtqiftt ysdnqpgvli qvyegeramt kdnnllgrfe lsgippaprg vpqievtfdi |
| 481 | dangilnvta tdkstgkank ititndkgrl skeeiermvq eaekykaede vqrervsakn |
| 541 | alesyafnmk savedeglkg kiseadkkkv ldkcqevisw ldantlaekd efehkrkele |
| 601 | qvcnpiisgl yqgaggpgpg gfgaqgpkgg sgsgptieev d |

| Ig kappa chain V-III region sie (e.g., GenBank Accession | |
|---|---|
| Number P01620 (SEQ ID NO: 34) | |
| 1 | eivitqspgt lslspgerat lscrasqsys nsylawyqqk pgqaprlliy gassratgip |
| 61 | drfsgsgsgt dftltisrle pddfavyycq qygsspqtfg qgskveikr |

| macrophage migration inhibitory factor (e.g., GenBank Accession | |
|---|---|
| Number P14174 (SEQ ID NO: 35): | |
| 1 | mpmfivntnv prasvpdgfl seltqqlaqa tgkppqyiav hvvpdqlmaf ggssepcalc |
| 61 | slhsigkigg aqnrsyskll cgllaerlri spdrvyinyy dmnaanvgwn nstfa |

| isoform 1 of ATP synthase subunit D, mitochondrial (e.g., GenBank | |
|---|---|
| Accession Number O75947-1 (SEQ ID NO: 36): | |
| 1 | magrklalkt idwvafaeii pqnqkaiass lkswnetlts rlaalpenpp aidwayykan |
| 61 | vakaglvddf ekkfnalkvp vpedkytaqv daeekedvks caewvslska riveyekeme |
| 121 | kmknlipfdq mtiedlneaf petkldkkky pywphqpien l |

| uncharacterized protein ENSP00000374051 (e.g., GenBank Accession | |
|---|---|
| Number A6NGM3 (SEQ ID NO: 37): | |
| mvvdknkrlt kggkkgakkk vvdpfskkdw ydvnapamfn irnigktlvt | 50 |
| rtqgtkiasd grvfevslad lqndevafrk fklitedvqg kncltnfhgv | 100 |
| dltsdkmcsm vkkwqtmiea hvdvkttdgy llrlfcvgft kkrnnqirkt | 150 |
| syaqhqqvlt sqirkkmmei mtrevqtndl kevvnklipd sigkdvekac | 200 |
| qsiyplhdvf vrkvkmlkkp kfelgklmel hgegcssgka tgdetgvkve | 250 |
| radgyelpvq esv | 263 |

| isocitrate dehydrogenase [NADP] cytoplasmic (e.g., GenBank Accession | |
|---|---|
| Number O75874 (SEQ ID NO: 38): | |
| 1 | mskkisggsv vemqgdemtr iiwelikekl ifpyveldlh sydlgienrd atndqvtkda |
| 61 | aeaikkhnvg vkcatitpde krveefklkq mwkspngtir nilggtvfre aiickniprl |
| 121 | vsgwvkpiii grhaygdqyr atdfvvpgpg kveitytpsd gtqkvtylvh nfeegggvam |
| 181 | gmynqdksie dfahssfqma lskgwplyls tkntilkkyd grfkdifqei ydkqyksqfe |
| 241 | aqkiwyehrl iddmvaqamk seggfiwack nydgdvqsds vaqgygslgm mtsvlvcpdg |
| 301 | ktveaeaahg tvtrhyrmyq kgqetstnpi asifawtrgl ahrakldnnk elaffanale |
| 361 | evsietieag fmtkdlaaci kglpnvqrsd ylntfefmdk lgenlkikla qakl |

| hemoglobin subunit delta (e.g., GenBank Accession Number P02042 | |
|---|---|
| (SEQ ID NO: 39): | |
| 1 | mvhltpeekt avnalwgkvn vdavggealg rllvvypwtq rffesfgdls spdavmgnpk |
| 61 | vkahgkkvlg afsdglahld nlkgtfsqls elhcdklhvd penfrllgnv lvcvlarnfg |
| 121 | keftpqmqaa yqkvvagvan alahkyh |

| isoform 1 of splicing factor, arginine/serine-rich 7 (e.g., GenBank | |
|---|---|
| Accession Number Q16629-1 (SEQ ID NO: 40): | |
| 1 | msrygrygge tkvyvgnlgt gagkgelera fsyygplrtv wiarnppgfa fvefedprda |
| 61 | edavrgldgk vicgsrvrve lstgmprrsr fdrpparrpf dpndrcyecg ekghyaydch |
| 121 | rysrrrrsrs rsrshsrsrg rrysrsrsrs rgrrsrsasp rrsrsislrr srsaslrrsr |
| 181 | sgsikgsryf qspsrsrsrs rsisrprssr sksrspspkr srspsgsprr saspermd |

| isoform 1 of mRNA-capping enzyme (e.g., GenBank Accession Number | |
|---|---|
| O60942-1 (SEQ ID NO: 41): | |
| 1 | mahnkipprw lncprrgqpv agrflplktm lgprydsqva eenrfhpsml snylkslkvk |
| 61 | mgllvdltnt srfydrndie kegikyiklq ckghgecptt entetfirlc erfnernppe |
| 121 | ligvhcthgf nrtgflicaf lvekmdwsie aavatfaqar ppgiykgdyl kelfrrygdi |
| 181 | eeappppllp dwcfeddede dededgkkes epgssasfgk rrkerlklga iflegvtvkg |
| 241 | vtqvttqpkl gevqqkchqf cgwegsgfpg aqpvsmdkqn iklldlkpyk vswkadgtry |
| 301 | mmlidgtnev fmidrdnsvf hvsnlefpfr kdlrmhlsnt lldgemiidr vngqavpryl |
| 361 | iydiikfnsq pvgdcdfnvr lqciereiis prhekmktgl idktqepfsv rnkpffdict |
| 421 | srkllegnfa kevshemdgl ifqptgkykp grcddilkwk ppslnsvdfr lkitrmggeg |
| 481 | llpqnvglly vggyerpfaq ikvtkelkqy dnkiieckfe nnswvfmrqr tdksfpnayn |
| 541 | tamavcnsis npvtkemlfe fidrctaasq gqkrkhhldp dtelmppppp krprplt |

| LON protease homolog, mitochondrial precursor (e.g., GenBank Accession | |
|---|---|
| Number P36776 (SEQ ID NO: 42): | |
| 1 | maastgyvrl wgaarcwvlr rpmlaaaggr vptaagawll rgqrtcdasp pwalwgrgpa |
| 61 | iggqwrgfwe assrgggafs ggedasegga eegaggaggs agagegpvit altpmtipdv |
| 121 | fphlpliait rnpvfprfik iievknkklv ellrrkvrla qpyvgvflkr ddsnesdvve |
| 181 | sldeiyhtgt faqihemqdl gdklrmivmg hrrvhisrql evepeepeae nkhkprrksk |
| 241 | rgkkeaedel sarhpaelam eptpelpaev lmvevenvvh edfqvteevk altaeivkti |
| 301 | rdiialnply resvlqmmqa gqrvvdnpiy lsdmgaaltg aeshelqdvl eetnipkrly |
| 361 | kalsllkkef elsklqqrlg reveekikqt hrkyllqeql kiikkelgle kddkdaieek |
| 421 | frerlkelvv pkhvmdvvde elsklglldn hssefnvtrn yldwltsipw gkysnenldl |
| 481 | araqavleed hygmedvkkr ilefiavsql rgstqgkilc fygppgvgkt siarsiaral |
| 541 | nreyfrfsvg gmtdvaeikg hrrtyvgamp gkiiqclkkt ktenplilid evdkigrgyq |
| 601 | gdpssallel ldpegnanfl dhyldvpvdl skvlfictan vtdtipeplr drmeminvsg |
| 661 | yvaqeklaia erylvpqara lcgldeskak lssdvltlli kqycresgvr nlqkqvekvl |
| 721 | rksaykivsg eaesvevtpe nlqdfvgkpv ftvermydvt ppgvvmglaw tamggstlfv |
| 781 | etslrrpqdk dakgdkdgsl evtgqlgevm kesariaytf araflmqhap andylvtshi |
| 841 | hlhvpegatp kdgpsagcti vtallslamg rpvrqnlamt gevsltgkil pvggikekti |
| 901 | aakragvtci vlpaenkkdf ydlaafiteg levhfvehyr eifdiafpde qaealaver |

| signal recognition particle 54 kDa protein (e.g., GenBank Accession | |
|---|---|
| Number P61011 (SEQ ID NO: 43): | |
| 1 | mvladlgrki tsalrslsna tiineevlna mlkevctall eadvniklvk qlrenvksai |
| 61 | dleemasgln krkmiqhavf kelvklvdpg vkawtptkgk qnvimfvglq gsgktttcsk |
| 121 | layyyqrkgw ktclicadtf ragafdqlkq natkaripfy gsytemdpvi iasegvekfk |
| 181 | nenfeiiivd tsgrhkqeds lfeemlqvan aiqpdnivyv mdasigqace aqakafkdkv |
| 241 | dvasvivtkl dghakgggal savaatkspi ifigtgehid dfepfktqpf iskllgmgdi |
| 301 | eglidkvnel klddnealie klkhgqftlr dmyeqfqnim kmgpfsqilg mipgfgtdfm |
| 361 | skgneqesma rlkklmtimd smndqeldst dgakvfskqp griqrvargs gvstrdvqel |
| 421 | ltqytkfaqm vkkmggikgl fkggdmsknv sqsqmaklnq qmakmmdprv lhhmggmagl |
| 481 | qsmmrqfqqg aagnmkgmmg fnnm |

| isoform long of galectin-9 (e.g., GenBank Accession Number O00182-1 | |
|---|---|
| (SEQ ID NO: 44): | |
| 1 | mafsgsqapy lspavpfsgt iqgglqdglq itvngtvlss sgtrfavnfq tgfsgndiaf |
| 61 | hfnprfedgg yvvcntrqng swgpeerkth mpfqkgmpfd lcflvqssdf kvmvngilfv |
| 121 | qyfhrvpfhr vdtisvngsv qlsyisfqnp rtvpvqpafs tvpfsqpvcf pprprgrrqk |
| 181 | ppgvwpanpa pitqtvihtv qsapgqmfst paippmmyph paypmpfitt ilgglypsks |
| 241 | illsgtvlps aqrfhinlcs gnhiafhlnp rfdenavvrn tqidnswgse erslprkmpf |
| 301 | vrgqsfsvwi lceahclkva vdgqhlfeyy hrlrnlptin rlevggdiql thvqt |

| integrin-linked protein kinase (e.g., GenBank Accession Number Q13418 | |
|---|---|
| (SEQ ID NO: 45): | |
| 1 | mddiftqcre gnavavrlwl dntendlnqg ddhgfsplhw acregrsavv emlimrgari |
| 61 | nvmnrgddtp lhlaashghr divqkllqyk adinavnehg nvplhyacfw gqdqvaedlv |
| 121 | angalvsicn kygempvdka kaplrellre raekmgqnln ripykdtfwk gttrtrprng |
| 181 | tlnkhsgidf kqlnfltkln enhsgelwkg rwqgndivvk vlkvrdwstr ksrdfneecp |
| 241 | rlrifshpnv lpvlgacqsp paphptlith wmpygslynv lhegtnfvvd qsqavkfald |
| 301 | margmaflht lepliprhal nsrsvmided mtarismadv kfsfqcpgrm yapawvapea |
| 361 | lqkkpedtnr rsadmwsfav llwelvtrev pfadlsnmei gmkvaleglr ptippgisph |
| 421 | vcklmkicmn edpakrpkfd mivpilekmq dk |

| bifunctional aminoacyl-tRNA synthetase (e.g., GenBank Accession Number | |
|---|---|
| P07814 (SEQ ID NO: 46): | |
| 1 | matlsltvns gdpplgalla vehvkddvsi sveegkenil hvsenviftd vnsilrylar |
| 61 | vattaglygs nlmehteidh wlefsatkls scdsftstin elnhclslrt ylvgnslsla |
| 121 | dlcvwatlkg naawqeqlkq kkapvhvkrw fgfleaqqaf qsvgtkwdvs ttkarvapek |
| 181 | kqdvgkfvel pgaemgkvtv rfppeasgyl highakaall nqhyqvnfkg klimrfddtn |
| 241 | pekekedfek viledvamlh ikpdqftyts dhfetimkya ekliqegkay vddtpaeqmk |
| 301 | aereqriesk hrknpieknl qmweemkkgs qfghscclra kidmssnngc mrdptlyrck |
| 361 | iqphprtgnk ynvyptydfa cpivdsiegv thalrtteyh drdeqfywii ealgirkpyi |
| 421 | weysrlnlnn tvlskrkltw fvneglvdgw ddprfptvrg vlrrgmtveg lkqfiaaqgs |
| 481 | srsvvnmewd kiwafnkkvi dpvapryval lkkevipvnv peaqeemkev akhpknpevg |
| 541 | lkpvwyspkv fiegadaetf segemvtfin wgnlnitkih knadgkiisl dakfnlenkd |
| 601 | ykkttkvtwl aetthalpip vicvtyehli tkpvlgkded fkqyvnknsk heelmlgdpc |
| 661 | lkdlkkgdii qlqrrgffic dqpyepvspy sckeapcvli yipdghtkem ptsgskektk |
| 721 | veatknetsa pfkerptpsl nnncttseds lvlynrvavq gdvvrelkak kapkedvdaa |
| 781 | vkqllslkae ykektgqeyk pgnppaeigq nissnssasi leskslydev aaqgevvrkl |
| 841 | kaekspkaki neavecllsl kaqykektgk eyipgqppls qssdssptrn sepagletpe |
| 901 | akvlfdkvas qgevvrklkt ekapkdqvdi avqellqlka qyksligvey kpvsatgaed |
| 961 | kdkkkkeken ksekqnkpqk qndgqrkdps knqggglsss gagegqgpkk qtrlgleakk |
| 1021 | eenladwysq vitksemiey hdisgcyilr pwayaiweai kdffdaeikk lgvencyfpm |
| 1081 | fvsqsaleke kthvadfape vawvtrsgkt elaepiairp tsetvmypay akwvqshrdl |
| 1141 | piklnqwcnv vrwefkhpqp flrtreflwq eghsafatme eaaeevlqil dlyaqvyeel |
| 1201 | laipvvkgrk tekekfaggd ytttieafis asgraiqggt shhlgqnfsk mfeivfedpk |
| 1261 | ipgekqfayq nswglttrti gvmtmvhgdn mglvlpprva cvqvviipcg itnalseedk |
| 1321 | ealiakcndy rrrllsvnir vradlrdnys pgwkfnhwel kgvpirlevg prdmkscqfv |
| 1381 | avrrdtgekl tvaeneaetk lqailediqv tlftrasedl kthmvvantm edfqkildsg |
| 1441 | kivqipfcge idcedwikkt tardqdlepg apsmgakslc ipfkplcelq pgakcvcgkn |
| 1501 | pakyytlfgr sy |

| isoform 1 of zinc finger protein 207 (e.g., GenBank Accession Number | |
|---|---|
| O43670-1 (SEQ ID NO: 47): | |
| 1 | mgrkkkkqlk pwcwycnrdf ddekiliqhq kakhfkchic hkklytgpgl aihcmqvhke |
| 61 | tidavpnaip grtdieleiy gmegipekdm derrrlleqk tqesqkkkqq ddsdeydddd |
| 121 | saastsfqpq pvqpqqgyip pmaqpglppv pgapgmppgi pplmpgvppl mpgmppvmpg |
| 181 | mppgmmpmgg mmppgpgipp lmpgmppgmp ppvprpgipp mtqaqavsap gilnrppapt |
| 241 | atvpapqppv tkplfpsagq mgtpvtssst assnseslsa sskalfpsta qaqaavqgpv |
| 301 | gtdfkplnst pattteppkp tfpaytqsta sttsttnsta akpaasitsk patltttsat |
| 361 | sklihpdedi sleerraqlp kyqrnlprpg qapignppvg piggmmppqp gipqqqgmrp |
| 421 | pmpphgqygg hhqgmpgylp gamppygqgp pmvppyqggp prppmgmrpp vmsqggry |

| inorganic pyrophosphatase (e.g., GenBank Accession Number Q15181 | |
|---|---|
| (SEQ ID NO: 48): | |
| 1 | msgfsteera apfsleyrvf lknekgqyis pfhdipiyad kdvfhmvvev prwsnakmei |
| 61 | atkdplnpik qdvkkgklry vanlfpykgy iwnygaipqt wedpghndkh tgccgdndpi |
| 121 | dvceigskvc argeiigvkv lgilamideg etdwkviain vddpdaanyn dindvkrlkp |
| 181 | gyleatvdwf rrykvpdgkp enefafnaef kdkdfaidii ksthdhwkal vtkktngkgi |
| 241 | scmnttlses pfkcdpdaar aivdalpppc esactvptdv dkwfhhqkn |

| calponin-2 (e.g., GenBank Accession Number Q99439 (SEQ ID NO: 49): | |
|---|---|
| 1 | msstqfnkgp syglsaevkn rllskydpqk eaelrtwieg ltglsigpdf qkglkdgtil |
| 61 | ctlmnklqpg svpkinrsmq nwhqlenlsn fikamvsygm npvdlfeand lfesgnmtqv |
| 121 | qvsllalagk aktkglqsgv digvkysekq ernfddatmk agqcviglqm gtnkcasqsg |
| 181 | mtaygtrrhl ydpknhilpp mdhstislqm gtnkcasqvg mtapgtrrhi ydtklgtdkc |
| 241 | dnssmslqmg ytqganqsgq vfglgrqiyd pkycpqgtva dgapsgtgdc pdpgevpeyp |
| 301 | pyyqeeagy |

| isoform 1 of muscleblind-like protein 3 (e.g., GenBank Accession | |
|---|---|
| Number Q9NUK0-1 (SEQ ID NO: 50): | |
| 1 | mtavnvalir dtkwltlevc refqrgtcsr adadckfahp prvchvengr vvacfdslkg |
| 61 | rctrenckyl hppphlktql eingrnnliq qktaaamfaq qmqlmlqnaq msslgsfpmt |
| 121 | psipanppma fnpyiphpgm glvpaelvpn tpvlipgnpp lampgavgpk lmrsdklevc |
| 181 | refqrgnctr gendcryahp tdasmieasd ntvticmdyi kgrcsrekck yfhppahlqa |
| 241 | rlkaahhqmn hsaasamalq pgtlqlipkr salekpngat pvfnptvfhc qqaltnlqlp |
| 301 | qpafipagpi lcmapasniv pmmhgatptt vsaattpats vpfaapttgn qlkf |

| cathepsin G precursor (e.g., GenBank Accession Number P08311 | |
|---|---|
| (SEQ ID NO: 51): | |
| 1 | mqplllllaf llptgaeage iiggresrph srpymaylqi qspagqsrcg gflvredfvl |
| 61 | taahcwgsni nvtlgahniq rrentqqhit arrairhpqy nqrtiqndim llqlsrrvrr |
| 121 | nrnvnpvalp raqeglrpgt lctvagwgrv smrrgtdtlr evqlrvqrdr qclrifgsyd |
| 181 | prrqicvgdr rerkaafkgd sggpllcnnv ahgivsygks sgvppevftr vssflpwirt |
| 241 | tmrsfklldq metpl |

| zinc finger and BTB domain-containing protein 34 (e.g., GenBank | |
|---|---|
| Accession Number Q8NCN2 (SEQ ID NO: 52): | |
| 1 | msvemdsssf iqfdvpeyss tvlsqlnelr lqgklcdiiv hiqgqpfrah kavlaasspy |
| 61 | frdhsalstm sglsisvikn pnvfeqllsf cytgrmslql kdvvsfltaa sflqmqcvid |
| 121 | kctqilesih skisvgdvds vtvgaeenpe srngvkdssf fanpveispp ycsqgrqpta |
| 181 | ssdlrmettp skalrsrlqe eghsdrgssg syseyeiqie gdheqgdllv resqitevkv |
| 241 | kmeksdrpsc sdssslgddg yhtemvdgeq vvavnvgsyg svlqhaysys qaasqptnvs |
| 301 | eafgslsnss psrsmlscfr ggrarqkral svhlhsdlqg lvqgsdseam mnnpgyessp |
| 361 | rersarghwy pynerliciy cgksfnqkgs ldrhmrlhmg icpfvckfcg kkytrkdqle |
| 421 | yhirghtddk pfrceicgkc fpfqgtlnqh lrknhpgvae vrsriesper tdvyveqkle |
| 481 | ndasasemgl dsrmeihtvs dapd |

| adenine phosphoribosyltransferase (e.g., GenBank Accession | |
|---|---|
| Number P07741 (SEQ ID NO: 53): | |
| 1 | madselqlve qrirsfpdfp tpgvvfrdis pvlkdpasfr aaigllarhl kathggridy |
| 61 | iagldsrgfl fgpslaqelg lgcvlirkrg klpgptlwas ysleygkael eiqkdalepg |
| 121 | qrvvvvddll atggtmnaac ellgrlqaev lecvslvelt slkgreklap vpffsllqye |

| 40S ribosomal protein S9 (e.g., GenBank Accession Number P46781 | |
|---|---|
| (SEQ ID NO: 54): | |
| 1 | mpvarswvcr ktyvtprrpf eksrldqelk ligeyglrnk revwrvkftl akirkaarel |
| 61 | ltldekdprr lfegnallrr lvrigvldeg kmkldyilgl kiedflerrl qtqvfklgla |
| 121 | ksihharvli rqrhirvrkq vvnipsfivr ldsqkhidfs lrspygggrp grvkrknakk |
| 181 | gqggagagdd eeed |

| TALIN-1 (e.g., GenBank Accession Number Q9Y490 (SEQ ID NO: 55): | |
|---|---|
| 1 | mvalslkisi gnvvktmqfe pstmvydacr iireripeap agppsdfglf lsdddpkkgi |
| 61 | wleagkaldy ymlrngdtme yrkkqrplki rmldgtvkti mvddsktvtd mlmticarig |
| 121 | itnhdeyslv relmeekkee itgtlrkdkt llrdekkmek lkqklhtdde lnwldhgrtl |
| 181 | reqgveehet lllrrkffys dqnvdsrdpv qlnllyvqar ddilngshpv sfdkacefag |
| 241 | fqcqiqfgph neqkhkagfl dlkdflpkey vkqkgerkif qahkncgqms eieakvryvk |
| 301 | larslktygv sfflvkekmk gknklvprll gitkecvmrv dektkeviqe wnltnikrwa |
| 361 | aspksftldf gdyqdgyysv qttegeqiaq liagyidiil kkkkskdhfg legdeestml |
| 421 | edsvspkkst vlqqqynrvg kvehgsvalp aimrsgasgp enfqvgsmpp aqqqitsgqm |
| 481 | hrghmpplts aqqaltgtin ssmqavqaaq atlddfdtlp plgqdaaska wrknkmdesk |
| 541 | heihsqvdai tagtasvvnl tagdpaetdy tavgcavtti ssnltemsrg vkllaalled |
| 601 | eggsgrpllq aakglagays ellrsaqpas aeprqnllqa agnvgqasge llqqigesdt |
| 661 | dphfqdalmq lakavasaaa alvlkaksva qrtedsglqt qviaaatqca lstsqlvact |
| 721 | kvvaptissp vcqeqlveag rlvakavegc vsasqaated gqllrgvgaa atavtqalne |
| 781 | llqhvkahat gagpagrydq atdtiltvte nifssmgdag emvrqarila qatsdlvnai |
| 841 | kadaegesdl ensrkllsaa kiladatakm veaakgaaah pdseeqqqrl reaaeglrma |
| 901 | tnaaaqnaik kklvqrleha akqaaasatq tiaaaqhaas tpkasagpqp llvqsckava |
| 961 | eqipllvqgv rgsqaqpdsp saqlaliaas qsflqpggkm vaaakasvpt iqdqasamql |
| 1021 | sqcaknlgta laelrtaaqk aqeacgplem dsalsvvqnl ekdlqevkaa ardgklkplp |
| 1081 | getmekctqd lgnstkavss aiaqllgeva qgnenyagia ardvagglrs laqaargvaa |
| 1141 | ltsdpavqai vldtasdvld kasslieeak kaaghpgdpe sqqrlaqvak avtqalnrcv |
| 1201 | sclpgqrdvd nalravgdas krllsdslpp stgtfqeaqs rlneaaagln qaatelvqas |
| 1261 | rgtpqdlara sgrfgqdfst fleagvemag qapsqedraq vvsnlkgism sssklllaak |
| 1321 | alstdpaapn lksqlaaaar avtdsinqli tmctqqapgq kecdnalrel etvrellenp |
| 1381 | vqpindmsyf gcldsvmens kvlgeamtgi sqnakngnlp efgdaistas kalcgfteaa |
| 1441 | aqaaylvgvs dpnsqagqqg lveptqfara nqaiqmacqs lgepgctqaq vlsaativak |
| 1501 | htsalcnscr lasarttnpt akrqfvqsak evanstanlv ktikaldgaf teenraqcra |
| 1561 | ataplleavd nlsafasnpe fssipaqisp egraamepiv isaktmlesa ggliqtaral |
| 1621 | avnprdppsw svlaghsrtv sdsikklits mrdkapgqle cetaiaalns clrdldqasl |
| 1681 | aavsqqlapr egisqealht qmltavqeis hlieplanaa raeasqlghk vsqmaqyfep |
| 1741 | ltlaavgaas ktlshpqqma lldqtktlae salqllytak eaggnpkqaa htqealeeav |
| 1801 | qmmteavedl tttlneaasa agvvggmvds itqainqlde gpmgepegsf vdyqttmvrt |
| 1861 | akaiavtvqe mvtksntspe elgplanqlt sdygrlasea kpaavaaene eigshikhrv |
| 1921 | qelghgcaal vtkagalqcs psdaytkkel iecarrvsek vshvlaalqa gnrgtqacit |
| 1981 | aasavsgiia dldttimfat agtlnregte tfadhregil ktakvlvedt kvlvqnaags |
| 2041 | qeklaqaaqs svatitrlad vvklgaaslg aedpetqvvl inavkdvaka lgdlisatka |
| 2101 | aagkvgddpa vwqlknsakv mvtnvtsllk tvkavedeat kgtraleatt ehirqelavf |
| 2161 | cspeppakts tpedfirmtk gitmatakav aagnscrqed viatanlsrr aiadmlrack |
| 2221 | eaayhpevap dvrlralhyg recangylel ldhvlltlqk pspelkqqlt ghskrvagsv |
| 2281 | teliqaaeam kgtewvdped ptviaenell gaaaaieaaa kkleqlkpra kpkeadesln |
| 2341 | feeqileaak siaaatsalv kaasaaqrel vaqgkvgaip analddgqws qglisaarmv |
| 2401 | aaatnnlcea anaavqghas qeklissakq vaastaqllv ackvkadqds eamkrlqaag |
| 2461 | navkrasdnl vkaaqkaaaf eeqenetvvv kekmvggiaq iiaaqeemlr kereleeark |
| 2521 | klaqirqqqy kflpselrde h |

| leucine-rich repeat-containing protein 59 (e.g., GenBank | |
|---|---|
| Accession Number Q96AG4 (SEQ ID NO: 56): | |
| 1 | mtkagskggn lrdkldgnel dlslsdlnev pvkelaalpk atildlscnk lttlpsdfcg |
| 61 | lthlvkldls knklqqlpad fgrlvnlqhl dllnnklvtl pvsfaqlknl kwldlkdnpl |
| 121 | dpvlakvagd cldekqckqc ankvlqhmka vqadqererq rrlevereae kkreakqrak |
| 181 | eaqerelrkr ekaeekerrr keydalkaak reqekkpkke anqapksksg srprkppprk |
| 241 | htrswavlkl llllllfgva gglvacrvte lqqqplctsv ntiydnavqg lrrheilqwv |
| 301 | lqtdsqq |

| ATP synthase subunit alpha, mitochondrial precursor (e.g., | |
|---|---|
| GenBank Accession Number P25705 (SEQ ID NO: 57): | |
| 1 | mlsvrvaaav vralprragl vsrnalgssf iaarnfhasn thlqktgtae mssileeril |
| 61 | gadtsvdlee tgrvlsigdg iarvhglrnv qaeemvefss glkgmslnle pdnvgvvvfg |
| 121 | ndklikegdi vkrtgaivdv pvgeellgrv vdalgnaidg kgpigsktrr rvglkapgii |
| 181 | prisvrepmq tgikavdslv pigrgqreli igdrqtgkts iaidtiinqk rfndgsdekk |
| 241 | klyciyvaig qkrstvaqlv krltdadamk ytivvsatas daaplqylap ysgcsmgeyf |
| 301 | rdngkhalii yddlskqava yrqmslllrr ppgreaypgd vfylhsrlle raakmndafg |
| 361 | ggsltalpvi etqagdvsay iptnvisitd gqifletelf ykgirpainv glsysrvgsa |
| 421 | aqtramkqva gtmklelaqy revaafaqfg sdldaatqql lsrgvrltel lkqgqyspma |
| 481 | ieeqvaviya gvrgyldkle pskitkfena flshvvsqhq allgtiradg kiseqsdakl |
| 541 | keivtnflag fea |

| isoform 7 of protein transport protein SEC31A (e.g., | |
|---|---|
| GenBank Accession Number O94979-7 (SEQ ID NO: 58): | |
| 1 | mklkevdrta mqawspagnh piylatgtsa qqldatfstn asleifeldl sdpsldmksc |
| 61 | atfssshryh kliwgpykmd skgdvsgvli aggengniil ydpskiiagd kevviaqndk |
| 121 | htgpvraldv nifqtnlvas ganeseiyiw dlnnfatpmt pgaktqpped isciawnrqv |
| 181 | qhilasasps gratvwdlrk nepiikvsdh snrmhcsgla whpdvatqmv laseddrlpv |
| 241 | iqmwdlrfas splrvlenha rgilaiawsm adpelllscg kdakilcsnp ntgevlyelp |
| 301 | tntqwcfdiq wcprnpavls aasfdgrisv ysimggstdg lrqkqvdkls ssfgnldpfg |
| 361 | tgqplpplqi pqqtaqhsiv lplkkppkwi rrpvgasfsf ggklvtfenv rmpshqgaeq |
| 421 | qqqqhhvfis qvvtekefls rsdqlqqavg sqgfinycqk kidasqtefe knvwsflkvn |
| 481 | feddsrgkyl ellgyrkedl gkkialalnk vdganvalkd sdqvaqsdge espaaeeqll |
| 541 | gehikeekee seflpssggt fnisvsgdid glitqalltg nfesavdlcl hdnrmadaii |
| 601 | laiaggqell artqkkyfak sqskitrlit avvmknwkei vescdlknwr ealaavltya |
| 661 | kpdefsalcd llgtrleneg dsllqtqacl cyicagnvek lvacwtkaqd gshplslqdl |
| 721 | iekvvilrka vqltqamdts tvgvllaakm sqyanllaaq gsiaaalafl pdntnqpnim |
| 781 | qlrdrlcraq gepvaghesp kipyekqqlp kyrpgpvagh hqmprvqtqq yyphgenppp |
| 841 | pgfimhgnvn pnaagqlpts pghmhtqvpp ypqpqpyqpa qpypfgtggs amyrpqqpva |
| 901 | pptsnaypnt pyissassyt gqsqlyaaqh gassptsspa tsfppppssg asfqhggpga |
| 961 | ppsssayalp pgttgtlpaa selpasqrtg pqngwndppa lnrvpkkkkm penfmppvpi |
| 1021 | tspimnplgd pqsqmlqqqp sapvplssqs sfpqphlpgg qpfhgvqqpl gqtgmppsfs |
| 1081 | kpniegapga pigntfqhvq slptkkitkk pipdehlilk ttfedliqrc lssatdpqtk |
| 1141 | rklddaskrl eflydklreq tlsptitsgl hniarsietr nysegltmht hivstsnfse |
| 1201 | tsafmpvlkv vltqanklgv |

| dihydroxyacetone kinase (e.g., GenBank Accession Number Q3LXA3 | |
|---|---|
| (SEQ ID NO: 59): | |
| 1 | mtskklvnsv agcaddalag lvacnpnlql lqghrvalrs dldslkgrva llsgggsghe |
| 61 | pahagfigkg mltgviagav ftspavgsil aairavaqag tvgtallvkn ytgdrlnfgl |
| 121 | areqaraegi pvemvvigdd saftvlkkag rrglcgtvli hkvagalaea gvgleeiakq |
| 181 | vnvvtkamgt lgvslsscsv pgskptfels adevelglgi hgeagvrrik matadeivkl |
| 241 | mldhmtnttn ashvpvqpgs svvmmvnnlg glsflelgii adatvrsleg rgvkiaralv |
| 301 | gtfmsalemp gisltlllvd epllklidae ttaaawpnva avsitgrkrs rvapaepqea |
| 361 | pdstaaggsa skrmalvler vcstllglee hlnaldraag dgdcgtthsr aaraiqewlk |
| 421 | egpppaspaq llsklsvlll ekmggssgal yglfltaaaq plkaktslpa wsaamdagle |
| 481 | amqkygkaap gdrtmldslw aagqelqawk spgadllqvl tkavksaeaa aeatknmeag |
| 541 | agrasyissa rleqpdpgav aaaailrail evlqs |

similar to heterogeneous nuclear ribonucleoproteins C1/C2 (HNRNP Cl/HNRNP
C2). ISOFORM 4 ENSEMBL Accession Number ENST0000342709 (SEQ ID NO: 60)(see
also, GenBank Accession No.: NM_004500.3 and UNIPARC Accession Number
IPI00868835):
masnvtnktdprsmnsrvfignlntlvvkksdveaifskygkivgcsvhkgfaffqyvnernaraavagedgrmiagq
vldinlaaepkvnrgkagykrsaaemygssfdldcdfqrdyydrmysyparvpppppiaraaikreltqikqkvdsfl
enlekiekeqskqavemnnvkseeeqssssvkkdetnvkmeseggaddsaeegdllddddnedggmtsws

18 kDa protein UNIPARC Accession Number IPI00796554 (SEQ ID NO: 61):
marsrtsssp aisqetevgg grkaiiifvp vpqlksfqki qvrlvrelek kfsgkhvvfi
aqrrilpkpt qksrtknkqk cprsrtltav hdafledlvf pseivgkrip vkldssrlik
vhldkaqqnn vehkvetfsg vykkltgkdv nfefpefql

| cold agglutinin FS-1 L-chain (e.g., GenBank Accession Number A2NB45: | |
|---|---|
| (SEQ ID NO: 62) | |
| divmtqspls lpvtpgepas iscrssqsll hsngfnylhw ylqkpgqspr | 50 |
| lliylgsnra sgvpdrfsgs gsgtdftlki srveaddvgi yycmqalqsp | 100 |
| ytfgqgtkle ikr | 113 |

| isoform 1 of heterogeneous nuclear ribonucleoprotein d0 (e.g., | |
|---|---|
| GenBank Accession Number Q14103-1 (SEQ ID NO: 63): | |
| 1 | mseeqfggdg aaaaataavg gsageqegam vaatqgaaaa agsgagtggg tasggteggs |
| 61 | aesegakida skneedeghs nssprhseaa taqreewkmf igglswdttk kdlkdyfskf |
| 121 | gevvdctlkl dpitgrsrgf gfvlfkeses vdkvmdqkeh klngkvidpk rakamktkep |
| 181 | vkkifvggls pdtpeekire yfggfgeves ielpmdnktn krrgfcfitf keeepvkkim |
| 241 | ekkyhnvgls kceikvamsk eqyqqqqqwg srggfagrar grgggpsqnw nqgysnywnq |
| 301 | gygnygynsq gyggyggydy tgynnyygyg dysnqqsgyg kvsrrgghqn sykpy |

| DAZAP1/MEF2D fusion protein (e.g., GenBank Accession Number | |
|---|---|
| Q5IRN2 (SEQ ID NO: 64): | |
| 1 | mnnsgadeig klfvggldws ttqetlrsyf sqygevvdcv imkdkttnqs rgfgfvkfkd |
| 61 | pncvgtvlas rphtldgrni dpkpctprgm qpertrpkeg wqkgprsdns ksnkifvggi |
| 121 | phncgetelr eyfkkfgvvt evvmiydaek qrprgngyvs araspgllpv angnslnkvi |
| 181 | paksppppth stqlgapsrk pdlrvitsqa gkglmhhlte dhldlnnaqr lgvsqsthsl |
| 241 | ttpvvsvatp sllsqglpfs smptayntdy qltsaelssl pafsspggls lgnvtawqqp |
| 301 | qqpqqpqqpq ppqqqppqpq qpqpqqpqqp qqppqqqshl vpvslsnlip gsplphvgaa |
| 361 | ltvtthphis iksepvspsr erspappppa vfpaarpepg dglsspaggs yetgdrddgr |
| 421 | gdfgptlgll rpapepeaeg savkrmrldt wtlk |

| POTE2 (e.g., GenBank Accession Number NP 001077007 (SEQ ID NO: 65)): | |
|---|---|
| 1 | mvvevdsmpa assvkkpfgl rskmgkwccr cfpcyresgk snvgtsgdhd dsamktlrsk |
| 61 | mgkwchhcfp ccrgsgksnv gasgdhddsa mktlrnkmgk wcchcfpccr gsgkskvgaw |
| 121 | gdyddsafme pryhvrgedl dklhraawwg kvprkdlivm lrdtdvnkkd kqkrtalhla |
| 181 | sangnsevvk llldrrcqln vldnkkrtal ikavqcqede calmllehgt dpnipdeygn |
| 241 | ttlhyaiyne dklmakalll ygadiesknk hgltplllgv heqkqqvvkf likkkanlna |
| 301 | ldrygrtali lavccgsasi vsllleqnid vssqdlsgqt areyavsshh hvicqllsdy |
| 361 | kekqmlkiss ensnpeqelk ltseeesqrf kgsensqpek msqeleinkd gdreveeemk |
| 421 | khesnnvgll enltngvtag ngdnglipqr ksrtpenqqf pdneseeyhr icellsdyke |
| 481 | kqmpkyssen snpeqdlklt seeesqrlkg sengqpekrs qepeinkdgd relenfmaie |
| 541 | emkkhgsthv gfpenltnga tagngddgli pprksrtpes qqfpdtenee yhsdeqndtq |
| 601 | kqfceeqntg ilhdeilihe ekqievvekm nselslsckk ekdvlhenst lreeiamlrl |
| 661 | eldtmkhqsq lrekkyledi esvkkkndnl lkalqlnelt mdddtavlvi dngsgmckag |
| 721 | fagddaprav fpsivgrprq qgmmggmhqk esyvgkeaqs krgiltlkyp mehgiitnwd |
| 781 | dmekiwhhtf ynelrvapee hpillteapl npkanrekmt qimfetfntp amyvaiqavp |
| 841 | slytsgrttg ivmdsgdgvt htvpiyegna lphatlrldl agrelpdylm kiltergyrf |
| 901 | ttmaereivr dikeklcyva ldfeqemata assssleksy elpdgqviti gnerfrcpea |
| 961 | lfqpcflgme scgihettfn simksdvdir kdlytntvls ggttmypgma hrmqkeiaal |
| 1021 | apsmmkirii appkrkysvw vggsilasls tfqqmwiskq eydesgpsiv hrkcf |

| Keratin 18 (KRT18) (e.g., GenBank Accession Number NP 000215 | |
|---|---|
| (SEQ ID NO: 66)): | |
| 1 | msfttrstfs tnyrslgsvq apsygarpvs saasvyagag gsgsrisvsr stsfrggmgs |
| 61 | gglatgiagg lagmggiqne ketmqslndr lasyldrvrs letenrrles kirehlekkg |
| 121 | pqvrdwshyf kiiedlraqi fantvdnari vlqidnarla addfrvkyet elamrqsven |
| 181 | dihglrkvid dtnitrlqle teiealkeel lfmkknheee vkglqaqias sgltvevdap |
| 241 | ksqdlakima diraqydela rknreeldky wsqqieestt vvttqsaevg aaettltelr |
| 301 | rtvqsleidl dsmrnlkasl enslrevear yalqmeqlng illhlesela qtraegqrqa |
| 361 | qeyeallnik vkleaeiaty rrlledgedf nlgdaldssn smqtiqkttt rrivdgkvvs |
| 421 | etndtkvlrh |

| PSME4 Isoform 1 of Proteasome activator complex subunit 4 (e.g., | |
|---|---|
| GenBank Accession Number NP 055429 (SEQ ID NO: 67)): | |
| 1 | mepaeragvg eppepggrpe pgprgfvpqk eivynkllpy aerldaesdl glaqikcnlg |
| 61 | ravqlqelwp gglfwtrkls tyirlygrkf skedhvlfik llyelvsipk leismmqgfa |
| 121 | rllinllkkk ellsradlel pwrplydmve rilysktehl glnwfpnsve nilktlvksc |
| 181 | rpyfpadata emleewrplm cpfdvtmqka ityfeiflpt slppelhhkg fklwfdelig |
| 241 | lwvsvqnlpq wegqlvnlfa rlatdnigyi dwdpyvpkif trilrslnlp vgssqvlvpr |
| 301 | fltnaydigh aviwitammg gpsklvqkhl aglfnsitsf yhpsnngrwl nklmkllqrl |
| 361 | pnsvvrrlhr erykkpswlt pvpdshkltd qdvtdfvqci iqpvllamfs ktgsleaaqa |
| 421 | lqnlalmrpe lvippvlert ypaletltep hqltatlscv igvarslvsg grwfpegpth |
| 481 | mlpllmralp gvdpndfskc mitfqfiatf stlvplvdcs svlqerndlt everelcsat |
| 541 | aefedfvlqf mdrcfglies stleqtreet etekmthles lvelglsstf stiltqcske |
| 601 | ifmvalqkvf nfstshifet rvagrmvadm craavkccpe eslklfvphc csvitqltmn |
| 661 | ddvlndeeld kellwnlqll seitrvdgrk lllyreqlvk ilqrtlhltc kqgytlscnl |
| 721 | lhhllrsttl iypteycsvp ggfdkppsey fpikdwgkpg dlwnlgiqwh vpsseevsfa |
| 781 | fylldsflqp elvklqhcgd gklemsrddi lqsltivhnc ligsgnllpp lkgepvtnlv |
| 841 | psmvsleetk lytgleydls renhreviat virkllnhil dnseddtksl fliikiigdl |
| 901 | lqfqgshkhe fdsrwksfnl vkksmenrlh gkkqhirall idrvmlghel rtltvegcey |
| 961 | kkihqdmird llrlstssys qvrnkaqqtf faalgaynfc crdiiplvle flrpdrqgvt |
| 1021 | qqqfkgalyc llgnhsgvcl anlhdwdciv qtwpaivssg lsqamslekp sivrlfddla |
| 1081 | ekihrqyeti gldftipksc veiaellqqs knpsinqill spekikegik rqqeknadal |
| 1141 | rnyenlvdtl ldgveqrnlp wkfehigigl lflllrddrv lplrairffv enlnhdaivv |
| 1201 | rkmaisavag ilkqlkrthk kltinpceis gcpkptqiia gdrpdnhwlh ydsktiprtk |
| 1261 | kewesscfve kthwgyytwp knmvvyagve eqpklgrsre dmteaeqiif dhfsdpkfve |
| 1321 | qlitflsled rkgkdkfnpr rfclfkgifr nfddaflpvl kphlehlvad shestqrcva |
| 1381 | eiiaglirgs khwtfekvek lwellcpllr talsnitvet yndwgaciat scesrdprkl |
| 1441 | hwlfellles plsgeggsfv dacrlyvlqg glaqqewrvp ellhrllkyl epkltqvykn |
| 1501 | vrerigsvlt yifmidvslp nttptisphv peftarilek lkplmdvdee iqnhvmeeng |
| 1561 | igeedertqg ikllktilkw lmasagrsfs tavteqlqll plffkiapve ndnsydelkr |
| 1621 | daklclslms qgllyphqvp lvlqvlkqta rssswharyt vltylqtmvf ynlfiflnne |
| 1681 | davkdirwlv islledeqle vremaattls gllqcnfltm dspmqihfeq lcktklpkkr |
| 1741 | krdpgsvgdt ipsaelvkrh agvlglgacv lsspydvptw mpqllmnlsa hlndpqpiem |
| 1801 | tvkktlsnfr rthhdnwqeh kqqftddqll vltdllvspc yya |

| Mitogen-activated protein kinase-activated protein kinase (MAPKAPK3) | |
|---|---|
| (e.g., GenBank Accession Number NP 004626 (SEQ ID NO: 68)): | |
| 1 | mdgetaeeqg gpvpppvapg gpglggapgg rrepkkyavt ddyqlskqvl glgvngkvle |
| 61 | cfhrrtgqkc alkllydspk arqevdhhwq asggphivci ldvyenmhhg krclliimec |
| 121 | meggelfsri qergdqafte reaaeimrdi gtaiqflhsh niahrdvkpe nllytskekd |
| 181 | avlkltdfgf akettqnalq tpcytpyyva pevlgpekyd kscdmwslgv imyillcgfp |
| 241 | pfysntgqai spgmkrrirl gqygfpnpew sevsedakql irlllktdpt erltitqfmn |
| 301 | hpwinqsmvv pqtplhtarv lqedkdhwde vkeemtsala tmrvdydqvk ikdlktsnnr |
| 361 | llnkrrkkqa gsssasqgcn nq |

| Complement component 1, s subcomponent (C1S) (e.g., | |
|---|---|
| GenBank Accession Number NP 001725 (SEQ ID NO: 69)): | |
| 1 | mwcivlfsll awvyaeptmy geilspnypq aypseveksw dievpegygi hlyfthldie |
| 61 | lsencaydsv qiisgdteeg rlcgqrssnn phspiveefq vpynklqvif ksdfsneerf |
| 121 | tgfaayyvat dinectdfvd vpcshfcnnf iggyfcscpp eyflhddmkn cgvncsgdvf |
| 181 | taligeiasp nypkpypens rceyqirlek gfqvvvtlrr edfdveaads agncldslvf |
| 241 | vagdrqfgpy cghgfpgpln ietksnaldi ifqtdltgqk kgwklryhgd pmpcpkedtp |
| 301 | nsvwepakak yvfrdvvqit cldgfevveg rvgatsfyst cqsngkwsns klkcqpvdcg |
| 361 | ipesiengkv edpestlfgs virytceepy yymengggge yhcagngswv nevlgpelpk |
| 421 | cvpvcgvpre pfeekqriig gsdadiknfp wqvffdnpwa ggalineywv ltaahvvegn |
| 481 | reptmyvgst svqtsrlaks kmltpehvfi hpgwkllevp egrtnfdndi alvrlkdpvk |
| 541 | mgptvspicl pgtssdynlm dgdlglisgw grtekrdrav rlkaarlpva plrkckevkv |
| 601 | ekptadaeay vftpnmicag gekgmdsckg dsggafavqd pndktkfyaa glvswgpqcg |
| 661 | tyglytrvkn yvdwimktmq enstpred |

| Lysozyme C precursor (LYZ) (e.g., GenBank Accession Number NP 000230 | |
|---|---|
| (SEQ ID NO: 70)): | |
| 1 | mkalivlglv llsvtvqgkv fercelartl krlgmdgyrg islanwmcla kwesgyntra |
| 61 | tnynagdrst dygifqinsr ywcndgktpg avnachlscs allqdniada vacakrvvrd |
| 121 | pqgirawvaw rnrcqnrdvr qyvqgcgv |

| Keritin Type Cytoskeletal 20 (KRT20) (e.g., GenBank Accession Number | |
|---|---|
| NP 061883 (SEQ ID NO: 71)): | |
| 1 | mdfsrrsfhr slssslqapv vstvgmqrlg ttpsvyggag grgirisnsr htvnygsdlt |
| 61 | gggdlfvgne kmamqnlndr lasylekvrt leqsnsklev qikqwyetna pragrdysay |
| 121 | yrqieelrsq ikdaqlqnar cvlqidnakl aaedfrlkye tergirltve adlqglnkvf |
| 181 | ddltlhktd1 eiqieelnkd lallkkehqe evdglhkhlg ntvnvevdaa pglnlgvimn |
| 241 | emrqkyevma qknlqeakeq ferqtavlqq qvtvnteelk gtevqltelr rtsqsleiel |
| 301 | qshlsmkesl ehtleetkar yssqlanlqs llssleaqlm girsnmerqn neyhilldik |
| 361 | trleqeiaty rrllegedvk tteyqlstle erdikktrki ktvvqevvdg kvvssevkev |
| 421 | eeni |

| RNASE3 (e.g., GenBank Accession Number NP 002926 (SEQ ID NO: 72)): | |
|---|---|
| 1 | mvpklftsqi clllllglmg vegslharpp qftraqwfai qhislnpprc tiamrainny |
| 61 | rwrcknqntf lrttfanvvn vcgnqsircp hnrtlnnchr srfrvpllhc dlinpgaqni |
| 121 | snctyadrpg rrfyvvacdn rdprdspryp vvpvhldtti |

| Aldehyde dehydrogenase X, mitochondrial precursor (ALDH1B1) (e.g., | |
|---|---|
| GenBank Accession Number NP 000683 (SEQ ID NO: 73)): | |
| 1 | mlrflaprll slqgrtarys saaalpspil npdipynqlf innewqdavs kktfptvnpt |
| 61 | tgevighvae gdradvdrav kaareafrlg spwrrmdase rgrllnrlad lverdrvyla |
| 121 | sletldngkp fqesyaldld evikvyryfa gwadkwhgkt ipmdgqhfcf trhepvgvcg |
| 181 | qiipwnfplv mqgwklapal atgntvvmkv aeqtplsaly laslikeagf ppgvvniitg |
| 241 | ygptagaaia qhvdvdkvaf tgstevghli qkaagdsnlk rvtlelggks psivladadm |
| 301 | ehaveqchea lffnmgqccc agsrtfvees iyneflertv ekakqrkvgn pfeldtqqgp |
| 361 | qvdkeqferv lgyiqlgqke gakllcgger fgergffikp tvfggvqddm riakeeifgp |
| 421 | vqplfkfkki eevverannt ryglaaavft rdldkamyft qalqagtvwv ntynivtcht |
| 481 | pfggfkesgn grelgedglk aytevktvti kvpqkns |

| CDNA FLJ25506 fis, clone CBR05185 (e.g., GenBank Accession Number | |
|---|---|
| Q8N7I6 (SEQ ID NO: 74)): | |
| 1 | mwicpggggg gggggggggg dredarpapl ccgrcwrsgc aarpprmvsi glrgavrgar |
| 61 | gchlgrpfsp svllcvgrpg saagaerghs lgsrefghrr gplpwcpanr rgspptagvp |
| 121 | rqppgfpaap aprgpgpltr llgrreagsk sqkllfrsar vqgggqfcps gsaflgvere |
| 181 | ptaglggaer rnarfwrger gqgrqakrpa psqpasplpg ggtwagcvgl vwmgtgfcga |
| 241 | pef |

| Isoform B of fibulin-1 precursor (FBLN1) (e.g., GenBank Accession | |
|---|---|
| Number P23142-2 (SEQ ID NO: 75)): | |
| 1 | meraapsrrv plpllllggl allaagvdad vlleaccadg hrmathqkdc slpyateske |
| 61 | crmvqeqcch sqleelhcat gislaneqdr catphgdnas leatfvkrcc hccllgraaq |
| 121 | aqgqsceysl mvgyqcgqvf raccvksqet gdldvgglqe tdkiieveee qedpylndrc |
| 181 | rgggpckqqc rdtgdevvcs cfvgyqllsd gvscedvnec itgshscrlg escintvgsf |
| 241 | rcqrdsscgt gyeltednsc kdidecesgi hnclpdficq ntlgsfrcrp klqcksgfiq |
| 301 | dalgncidin eclsisapcp ightcinteg sytcqknvpn cgrgyhlnee gtrcvdvdec |
| 361 | appaepcgkg hrcvnspgsf rcecktgyyf dgisrmcvdv necqrypgrl cghkcentlg |
| 421 | sylcscsvgf rlsvdgrsce dinecssspc sqecanvygs yqcycrrgyq lsdvdgvtce |
| 481 | didecalptg ghicsyrcin ipgsfqcscp ssgyrlapng rncqdidecv tgihncsine |
| 541 | tcfniqggfr clafecpeny rrsaatlqqe ktdtvrciks crpndvtcvf dpvhtishtv |
| 601 | islptfreft rpeeiiflra itpphpasqa niifditegn lrdsfdiikr ymdgmtvgvv |
| 661 | rqvrpivgpf havlklemny vvggvvshrn vvnvrifvse ywf |

| Nucleobindin 1 (NUCB1) (e.g., GenBank Accession Number NP 006175 | |
|---|---|
| (SEQ ID NO: 76)): | |
| 1 | mppsgprgtl lllpllllll lravlavple rgapnkeetp atespdtgly yhrylqevid |
| 61 | vletdghfre klqaanaedi ksgklsreld fvshhvrtkl delkrqevsr lrmllkakmd |
| 121 | aeqdpnvqvd hlnllkqfeh ldpqnqhtfe ardlelliqt atrdlaqyda ahheefkrye |
| 181 | mlkeherrry leslgeeqrk eaerkleeqq rrhrehpkvn vpgsqaqlke vweeldgldp |
| 241 | nrfnpktffi lhdinsdgvl deqelealft kelekvydpk needdmreme eerlrmrehv |
| 301 | mknvdtnqdr lvtleeflas tqrkefgdtg egwetvemhp ayteeelrrf eeelaareae |
| 361 | lnakaqrlsq etealgrsqg rleaqkrelq gavlhmeqrk qqqqqqqghk apaahpegql |
| 421 | kfhpdtddvp vpapagdqke vdtsekklle rlpevevpqh l |

| Histone cluster 2, H2ba (HIST2H2BA) (e.g., GenBank Accession Number | |
|---|---|
| NP 001019770 (SEQ ID NO: 77)): | |
| 1 | mpdpaksapa pkkgskkavt kvqkkdgkkr krsrkesysv yvykvlkqvh pdtgisskam |
| 61 | gimnsfvndi feriageasr lahynkrsti tsreiqtavr lllpgelakh avsegtkavt |
| 121 | kytssk |

| Tripartite motif-containing 28 (TRIM28) (e.g., GenBank Accession | |
|---|---|
| Number NP 005753 (SEQ ID NO: 78)): | |
| 1 | maasaaaasa aaasaasgsp gpgegsagge krstapsaaa sasasaaass pagggaeale |
| 61 | llehcgvcre rlrpereprl lpclhsacsa clgpaapaaa nssgdggaag dgtvvdcpvc |
| 121 | kqqcfskdiv enyfmrdsgs kaatdaqdan qcctscedna patsycvecs eplcetcvea |
| 181 | hqrvkytkdh tvrstgpaks rdgertvycn vhkheplvlf cescdtltcr dcqlnahkdh |
| 241 | qyqfledavr nqrkllaslv krlgdkhatl qkstkevrss irqvsdvqkr vqvdvkmail |
| 301 | qimkelnkrg rvlvndaqkv tegqqerler qhwtmtkiqk hqehilrfas walesdnnta |
| 361 | lllskkliyf qlhralkmiv dpvephgemk fqwdlnawtk saeafgkiva erpgtnstgp |
| 421 | apmapprapg plskqgsgss qpmevqegyg fgsgddpyss aephvsgvkr srsgegevsg |
| 481 | lmrkvprvsl erldldltad sqppvfkvfp gsttedynli viergaaaaa tgqpgtapag |
| 541 | tpgapplagm aivkeeetea aigapptate gpetkpvlma laegpgaegp rlaspsgsts |
| 601 | sglevvapeg tsapgggpgt lddsaticrv cqkpgdlvmc nqcefcfhld chlpalqdvp |
| 661 | geewscslch vlpdlkeedg slsldgadst gvvaklspan qrkcervlla lfchepcrpl |
| 721 | hqlatdstfs ldqpggtldl tlirarlqek lsppysspqe faqdvgrmfk qfnkltedka |
| 781 | dvqsiiglqr ffetrmneaf gdtkfsavlv epppmslpga glssqelsgg pgdgp |

| Peroxisomal D3, D2 enoyl-CoA isomerase (PECI) (e.g., GenBank | |
|---|---|
| Accession Number NP 006108 (SEQ ID NO: 79)): | |
| 1 | mnrtamrasq kdfensmnqv kllkkdpgne vklklyalyk qategpcnmp kpgvfdlink |
| 61 | akwdawnalg slpkeaarqn yvdlvsslsp slesssqvep gtdrkstgfe tlvvtsedgi |
| 121 | tkimfnrpkk knaintemyh eimralkaas kddsiitvlt gngdyyssgn dltnftdipp |
| 181 | ggveekaknn avllrefvgc fidfpkplia vvngpavgis vtllglfdav yasdratfht |
| 241 | pfshlgqspe gcssytfpki mspakateml ifgkkltage acaqglvtev fpdstfqkev |
| 301 | wtrlkafakl ppnalriske virkrerekl havnaeecnv lqgrwlsdec tnavvnflsr |
| 361 | kskl |

| Peptidylprolyl isomerase B (PPIB) (e.g., GenBank Accession | |
|---|---|
| Number NP 000933 (SEQ ID NO: 80)): | |
| 1 | mlrlsernmk vllaaaliag svfflllpgp saadekkkgp kvtvkvyfdl rigdedvgrv |
| 61 | ifglfgktvp ktvdnfvala tgekgfgykn skfhrvikdf miqggdftrg dgtggksiyg |
| 121 | erfpdenfkl khygpgwvsm anagkdtngs qffittvkta wldgkhvvfg kvlegmevvr |
| 181 | kvestktdsr dkplkdviia dcgkievekp faiake |

Similar to 40S ribosomal protein S17 (e.g.,
GenBank Accession Number IP00743305
(SEQ ID NO: 81)):
mgrvrtktykkaarviiekyytrlgndfhtnkrvceeiaiipskklrnk
ipeilgtdrrtsdwrgdqlscipvpfpnstmelakglqdnsrscvhssk
tccryhtvgppqlakigstgqvdqsgrprppnradlamepshaekdnhs
alstpeagqsthg

Eukaryotic translation elongation factor 1 gamma
(EEFlG) (e.g., GenBank Accession
Number IPI00747497 (SEQ ID NO: 82)):
avgtlytypenwrafkaliaaqysgaqvrvlsapphfhfgqtnrtpefl
rkfpagkvpafegddgfcvfesnaiayyvsneelrgstpeaaaqvvqwv
sfadsdivppastwvfptlgimhhnkqatenakeevrrilglldaylkt
rtflvgervtladitvvctllwlykqvlepsfrqafpntnrwfltcinq
pqfravlgevklcekmaqfdakkfaetqpkkdtprkekgsreekqkpqa
erkeekkaaapapeeemdeceqalaaepkakdpfahlpkstfvldefkr
kysnedtlsvalpyfwehfdkdqwslwyseyrfpeeltqtfmscnlitg
mfqrldklrknafasvilfgtnnsssisgvwvfrgqelafplspdwqvd
yesytwrkldpgseetqtlvreyfswegafqhvgkafnqgkifk

| Keratin 8 (KRT8) (e.g., GenBank Accession Number | |
|---|---|
| NP 002264 (SEQ ID NO: 83)): | |
| 1 | msirvtqksy kvstsgpraf ssrsytsgpg srissssfsr vgssnfrgql gggyggasgm |
| 61 | ggitavtvnq sllsplvlev dpniqavrtq ekeqiktlnn kfasfidkvr fleqqnkmle |
| 121 | tkwsllqqqk tarsnmdnmf esyinnlrrq letlgqeklk leaelgnmqg lvedfknkye |
| 181 | deinkrteme nefvlikkdv deaymnkvel esrlegltde inflrqlyee eirelqsqis |
| 241 | dtsvvlsmdn srsldmdsii aevkaqyedi anrsraeaes myqikyeelq slagkhgddl |
| 301 | rrtkteisem nrnisrlqae ieglkgqras leaaiadaeq rgelaikdan aklseleaal |
| 361 | qrakqdmarq lreyqelmnv klaldieiat yrkllegees rlesgmqnms ihtkttsgya |
| 421 | gglssayggl tspglsyslg ssfgsgagss sfsrtsssra vvvkkietrd gklvsessdv |
| 481 | lpk |

| Fibulin 2 (FBLN2) (e.g., GenBank Accession Number | |
|---|---|
| NP 001989 (SEQ ID NO: 84)): | |
| 1 | mvllwepaga wlalglalal gpsvaaaapr qdctgvecpp lencieeale pgaccatcvq |
| 61 | qgcacegyqy ydclqggfvr grvpagqsyf vdfgstecsc ppgggkiscq fmlcpeippn |
| 121 | cieavvvads cpqcgqvgcv haghkyaagh tvhlppcrac hcpdaggeli cyqlpgchgn |
| 181 | fsdaeegdpe rhyedpysyd qevaeveaat alggevqaga vqagaggppa algggsqpls |
| 241 | tiqappwpav lprptaaaal gppapvqaka rrvtedseee eeeeeereem avteqlaagg |
| 301 | hrgldglptt apagpslpiq eeraeagara eagarpeenl ildaqatsrs tgpegvthap |
| 361 | slgkaalvpt qavpgsprdp vkpsphnils tslpdaawip ptrevprkpq vlphshveed |
| 421 | tdpnsvhsip rsspegstkd lietccaagq qwaidndecl eipesgtedn vcrtaqrhcc |
| 481 | vsylqekscm agvlgakege tcgaedndsc gislykqccd ccglglrvra egqscesnpn |
| 541 | lgypcnhvml sccegeepli vpevrrppep aaaprrvsea emagrealsl gteaelpnsl |
| 601 | pgddqdecll lpgelcqhlc intvgsyhca cfpgfslqdd grtcrpeghp pqpeapqepa |
| 661 | lksefsqvas ntiplplpqp ntckdngpck qvcstvggsa icscfpgyai madgvscedi |
| 721 | necvtdlhtc srgehcvntl gsfhcykalt cepgyalkdg ecedvdecam gthtcqpgfl |
| 781 | cqntkgsfyc qarqrcmdgf lqdpegncvd inectslsep crpgfscint vgsytcqrnp |
| 841 | licargyhas ddgtkcvdvn ecetgvhrcg egqvchnlpg syrcdckagf qrdafgrgci |
| 901 | dvnecwaspg rlcqhtcent lgsyrcscas gfllaadgkr cedvneceaq rcsqecaniy |
| 961 | gsvqcycrqg yqlaedghtc tdidecaqga gilctfrcln vpgsyqcacp eqgytmtang |
| 1021 | rsckdvdeca lgthncseae tchniqgsfr clrfecppny vqvsktkcer ttchdflecq |
| 1081 | nsparithyq lnfqtgllvp ahifrigpap aftgdtialn iikgneegyf gtrrlnaytg |
| 1141 | vvylqravle prdfaldvem klwrqgsvtt flakmhifft tfal |

| VIM (e.g., GenBank Accession Number NP 003371 (SEQ ID NO: 85)): | |
|---|---|
| 1 | mstrsyssss yrrmfggpgt asrpsssrsy vttstrtysl gsalrpstsr slyasspggv |
| 61 | yatrssavrl rssvpgvrll qdsvdfslad aintefkntr tnekvelqel ndrfanyidk |
| 121 | vrfleqqnki llaeleqlkg qgksrlgdly eeemrelrrq vdqltndkar veverdnlae |
| 181 | dimrlreklq eemlqreeae ntlqsfrqdv dnaslarldl erkveslqee iaflkklhee |
| 241 | eigelqaqiq eqhvqidvdv skpdltaalr dvrqqyesva aknlqeaeew ykskfadlse |
| 301 | aanrnndalr qakqesteyr rqvqsltdev dalkgtnesl erqmremeen faveaanyqd |
| 361 | tigrlqdeiq nmkeemarhl reyqdllnvk maldieiaty rkllegeesr islplpnfss |
| 421 | lnlretnlds lplvdthskr tlliktvetr dgqvinetsq hhddle |

| Fibrinogen alpha chain (FGA) (e.g., GenBank Accession Number | |
|---|---|
| NP 000499 (SEQ ID NO: 86)): | |
| 1 | mfsmrivclv lsvvgtawta dsgegdflae gggvrgprvv erhqsackds dwpfcsdedw |
| 61 | nykcpsgcrm kglidevnqd ftnrinklkn slfeyqknnk dshslttnim eilrgdfssa |
| 121 | nnrdntynrv sedlrsriev lkrkviekvq hiqllqknvr aqlvdmkrle vdidikirsc |
| 181 | rgscsralar evdlkdyedq qkqleqviak dllpsrdrqh lplikmkpvp dlvpgnfksq |
| 241 | lqkvppewka ltdmpqmrme lerpggneit rggstsygtg setesprnps sagswnsgss |
| 301 | gpgstgnrnp gssgtggtat wkpgssgpgs tgswnsgssg tgstgnqnpg sprpgstgtw |
| 361 | npgssergsa ghwtsessvs gstgqwhses gsfrpdspgs gnarpnnpdw gtfeevsgnv |
| 421 | spgtrreyht eklvtskgdk elrtgkekvt sgsttttrrs csktvtktvi gpdghkevtk |
| 481 | evvtsedgsd cpeamdlgtl sgigtldgfr hrhpdeaaff dtastgktfp gffspmigef |
| 541 | vsetesrgse sgiftntkes sshhpgiaef psrgksssys kqftsstsyn rgdstfesks |
| 601 | ykmadeagse adhegthstk rghaksrpvr dcddvlqthp sgtqsgifni klpgsskifs |
| 661 | vycdqetslg gwlliqqrmd gslnfnrtwq dykrgfgsln degegefwlg ndylhlltqr |
| 721 | gsvlrveled wagneayaey hfrvgseaeg yalqvssyeg tagdaliegs veegaeytsh |
| 781 | nnmqfstfdr dadqweenca evygggwwyn ncqaanlngi yypggsydpr nnspyeieng |
| 841 | vvwvsfrgad yslravrmki rplvtq |

| Annexin A2 (ANXA2) (e.g., GenBank Accession Number NP 001002858 | |
|---|---|
| (SEQ ID NO: 87)): | |
| 1 | mgrqlagcgd agkkasfkms tvheilckls legdhstpps aygsvkaytn fdaerdalni |
| 61 | etaiktkgvd evtivniltn rsnaqrqdia fayqrrtkke lasalksals ghletvilgl |
| 121 | lktpaqydas elkasmkglg tdedslieii csrtnqelqe inrvykemyk tdlekdiisd |
| 181 | tsgdfrklmv alakgrraed gsvidyelid qdardlydag vkrkgtdvpk wisimtersv |
| 241 | phlqkvfdry ksyspydmle sirkevkgdl enaflnlvqc iqnkplyfad rlydsmkgkg |
| 301 | trdkvlirim vsrsevdmlk irsefkrkyg kslyyyiqqd tkgdyqkall ylcggdd |

| H2A histone family, member J (H2AFJ) (e.g., GenBank Accession Number | |
|---|---|
| NP 808760 (SEQ ID NO: 88)): | |
| 1 | msgrgkqggk vrakaksrss raglqfpvgr vhrllrkgny aervgagapv ylaavleylt |
| 61 | aeilelagna ardnkktrii prhlqlairn deelnkllgk vtiaqggvlp niqavllpkk |
| 121 | tesqktksk |

| Actin alpha, cardiac muscle 1 (ACTC1) (e.g., GenBank Accession Number | |
|---|---|
| NP 005150 (SEQ ID NO: 89)): | |
| 1 | mcddeettal vcdngsglvk agfagddapr avfpsivgrp rhqgvmvgmg qkdsyvgdea |
| 61 | qskrgiltlk ypiehgiitn wddmekiwhh tfynelrvap eehptlltea plnpkanrek |
| 121 | mtqimfetfn vpamyvaiqa vlslyasgrt tgivldsgdg vthnvpiyeg yalphaimrl |
| 181 | dlagrdltdy lmkiltergy sfvttaerei vrdikeklcy valdfenema taasssslek |
| 241 | syelpdgqvi tignerfrcp etlfqpsfig mesagihett ynsimkcdid irkdlyannv |
| 301 | lsggttmypg iadrmqkeit alapstmkik iiapperkys vwiggsilas lstfqqmwis |
| 361 | kqeydeagps ivhrkcf |

| Keratin 19 (KRT19) (e.g., GenBank Accession Number | |
|---|---|
| NP 002267 (SEQ ID NO: 90)): | |
| 1 | mtsysyrqss atssfgglgg gsvrfgpgva frapsihggs ggrgvsvssa rfvsssssga |
| 61 | ygggyggvlt asdgllagne kltmqnlndr lasyldkvra leaangelev kirdwyqkqg |
| 121 | pgpsrdyshy yttiqdlrdk ilgatiensr ivlqidnarl aaddfrtkfe teqalrmsve |
| 181 | adinglrrvl deltlartdl emqieglkee laylkknhee eistlrgqvg gqvsvevdsa |
| 241 | pgtdlakils dmrsqyevma eqnrkdaeaw ftsrteelnr evaghteqlq msrsevtdlr |
| 301 | rtlqgleiel qsqlsmkaal edtlaetear fgaqlahiqa lisgieaqlg dvradserqn |
| 361 | qeyqrlmdik srlegeiaty rsllegqedh ynnlsaskvl |

| Immunoglobin lambda locus(IGL@protein) (e.g., GenBank Accession Number | |
|---|---|
| Q6PIQ7 (SEQ ID NO: 91)): | |
| 1 | mawallllsl ltqgtgswaq saltqprsys gspgqsvtip ctgtssdvgn ynyvswyrqh |
| 61 | pgkapklmiy dvnkrpsgvp drfsgsksgn tasltisglq aedeadyycc syagtytfgv |
| 121 | fggqtkltvl gqpkaapsvt lfppsseelq ankatlvcli sdfypgavtv awkadsspvk |
| 181 | agvetttpsk qsnnkyaass ylsltpeqwk shksyscqvt hegstvektv aptecs |

| Immunoglobulin heavy constant mu (IGHM) (e.g., GenBank Accession | |
|---|---|
| Number Q8WUK1 (SEQ ID NO: 92)): | |
| 1 | mefglswvfl vallrgvqcq vglvesgggv vqpgrslrls caasgftfss ygmhwvrqap |
| 61 | gkglewvavi sydgsnkyya dsvkgrftis rdnskntlyl qmnslraedt avyycakdws |
| 121 | egvetfdiwg qgtmvtvssg sasaptlfpl vscenspsdt ssvavgclaq dflpdsitfs |
| 181 | wkyknnsdis strgfpsvlr ggkyaatsqv llpskdvmqg tdehvvckvq hpngnkeknv |
| 241 | plpviaelpp kvsvfvpprd gffgnprksk licqatgfsp rqiqvswlre gkqvgsgvtt |
| 301 | dqvqaeakes gpttykvtst ltikesdwls qsmftcrvdh rgltfqqnas smcvpdqdta |
| 361 | irvfaippsf asifltkstk ltclvtdltt ydsvtiswtr qngeavktht niseshpnat |
| 421 | fsavgeasic eddwnsgerf tctvthtdlp splkqtisrp kgvalhrpdv yllppareql |
| 481 | nlresatitc lvtgfspadv fvqwmqrgqp lspekyvtsa pmpepqapgr yfahsiltvs |
| 541 | eeewntgety tcvvahealp nrvtertvdk stegevsade egfenlwata stfivlflls |
| 601 | lfysttvtlf kvk |

| EGF-containing fibulin-like extracellular matrix protein 1 (EFEMP1) | |
|---|---|
| (e.g., GenBank Accession Number Q12805-3 (SEQ ID NO: 93)): | |
| 1 | mlkalfltml tlalvksqdt eetitytqct dgyewdpvrq qckdidecdi vpdackggmk |
| 61 | cvnhyggylc lpktaqiivn neqpqqetqp aegtsgattg vvaassmats gvlpgggfva |
| 121 | saaavagpem qtgrnnfvir rnpadpqrip snpshriqca agyeqsehnv cqdidectag |
| 181 | thncradqvc inlrgsfacq cppgyqkrge qcvdidecti ppychqrcvn tpgsfycqcs |
| 241 | pgfqlaanny tcvdinecda snqcaqqcyn ilgsficqcn qgyelssdrl ncedidecrt |
| 301 | ssylcqyqcv nepgkfscmc pqgyqvvrsr tcqdinecet tnecredemc wnyhggfrcy |
| 361 | prnpcqdpyi ltpenrcvcp vsnamcrelp qsivykymsi rsdrsvpsdi fqiqattiya |
| 421 | ntintfriks gnengefylr qtspvsamlv lvkslsgpre hivdlemltv ssigtfrtss |
| 481 | vlrltiivgp fsf |

| Tripartite motif-containing protein 34 (e.g., GenBank Accession Number | |
|---|---|
| NP 067629 (SEQ ID NO: 94)): | |
| 1 | maskillnvq eevtcpicle llteplsldc ghslcracit vsnkeavtsm ggksscpvcg |
| 61 | isysfehlqa nqhlaniver lkevklspdn gkkrdlcdhh geklllfcke drkvicwlce |
| 121 | rsqehrghht vlteevfkec qeklqavlkr lkkeeeeaek leadireekt swkyqvqter |
| 181 | qriqtefdql rsilnneeqr elqrleeeek ktldkfaeae delvqqkqlv relisdvecr |
| 241 | sqwstmellq dmsgimkwse iwrlkkpkmv skklktvfha pdlsrmlqmf reltavrcyw |
| 301 | vdvtlnsvnl nlnlvlsedq rqvisvpiwp fqcynygvlg sqyfssgkhy wevdvskkta |
| 361 | wilgvycrty srhmkyvvrr canrqnlytk yrplfgywvi glqnkckygv feeslssdpe |
| 421 | vltlsmavpp crvgvfldye agivsffnvt shgsliykfs kccfsqpvyp yfnpwncpap |
| 481 | mtlcppss |

| Isoform 3 of AP1-subunit Gamma Binding Protein 1 (e.g., GenBank Accession | |
|---|---|
| Number NP 542117(SEQ ID NO: 95)): | |
| 1 | malrpgagsg gggaagagag saggggfmfp vaggirppqa glmpmqqqgf pmvsvmqpnm |
| 61 | qgimgmnyss qmsqgpiamq agipmgpmpa agmpylgqap flgmrppgpq ytpdmqkqfa |
| 121 | eeqqkrfeqq qklleeerkr rgfeeqkqkl rllssvkpkt geksrddale aikgnldgfs |
| 181 | rdakmhptpa shpkkpgpsl eekflvscdi stsgqeqikl ntsevghkal gpgsskkyps |
| 241 | lmasngvavd gcvsgtttae aentsdqnls ieesgvgvfp sqdpaqprmp pwiyneslvp |
| 301 | daykkilett mtptgidtak lypilmssgl pretlgqiwa lanrttpgkl tkeelytvla |
| 361 | miavtqrgvp amspdalnqf paapiptlsg fsmtlptpvs qptvipsgpa gsmplslgqp |
| 421 | vmginlvgpv ggaaaqassg fiptypanqv vkpeeddfqd fqdasksgsl ddsfsdfqel |
| 481 | passktsnsq hgnsapsllm plpgtkalps mdkyavfkgi aadkssentv ppgdpgdkys |
| 541 | afrelegtae nkplgesfae frsagtddgf tdfktadsys plepptkdkt fppsfpsgti |
| 601 | qqkqqtqvkn plnladldmf ssvncssekp lsfsavfsts ksystpqstg saatmtalaa |
| 661 | tktssladdf gefslfgeys glapvgeqdd fadfmafsns sisseqkpdd kydalkeeas |
| 721 | pvpltsnvgs tvkggqnsta astkydvfrq lslegsglgv edlkdntpsg ksdddfadfh |
| 781 | sskfssinsd kslgekavaf rhtkedsasv ksldlpsigg ssvgkedsed alavqfdmkl |
| 841 | advggdlkhv msdssldlpt vsgqhppaad iedlkyaafg syssnfavst ltsydwsdrd |
| 901 | datqgrklsp fvlsagsgsp satsilqkke tsfgssenit mtslskvttf vsedalpett |
| 961 | fpalasfkdt ipqtseqkey enrdykdftk qdlptaersq eatcpspass gasqetpnec |
| 1021 | sddfgefqse kpkiskfdfl vatsqskmks seemiksela tfdlsvqgsh krslslgdke |
| 1081 | isrsspspal eqpfrdrsnt lnekpalpvi rdkykdltge veeneryaye wqrclgsaln |
| 1141 | vikkandtln gissssvcte viqsaggmey llgvvevyrv tkrvelgika tavcseklqq |
| 1201 | llkdidkvwn nligfmslat ltpdensldf sscmlrpgik naqelacgvc llnvdsrsra |
| 1261 | fnsetdsfkl aygghqyhas canfwincve pkppglvlpd ll |

| Proflin-1 (e.g., GenBank Accession Number NP 005013 (SEQ ID NO: 96)): | |
|---|---|
| 1 | magwnayidn lmadgtcqda aivgykdsps vwaavpgktf vnitpaevgv lvgkdrssfy |
| 61 | vngltlggqk csvirdsllq dgefsmdlrt kstggaptfn vtvtktdktl vllmgkegvh |
| 121 | gglinkkcye mashlrrsqy |

| Histone H4 (e.g., GenBank Accession Number | |
|---|---|
| NP 001029249 (SEQ ID NO: 97)): | |
| 1 | msgrgkggkg lgkggakrhr kvlrdniqgi tkpairrlar rggvkrisgl iyeetrgvlk |
| 61 | vflenvirda vtytehakrk tvtamdvvya lkrqgrtlyg fgg |

| Hemoglobin subunit alpha (e.g., GenBank Accession Number NP 000549 | |
|---|---|
| (SEQ ID NO: 98)): | |
| 1 | mvlspadktn vkaawgkvga hageygaeal ermflsfptt ktyfphfdls hgsaqvkghg |
| 61 | kkvadaltna vahvddmpna lsalsdlhah klrvdpvnfk llshcllvtl aahlpaeftp |
| 121 | avhasldkfl asvstvltsk yr |

| Transgelin (e.g., GenBank Accession Number NP 001001522 | |
|---|---|
| (SEQ ID NO: 99)): | |
| 1 | mankgpsygm srevqskiek kydeeleerl vewiivqcgp dvgrpdrgrl gfqvwlkngv |
| 61 | ilsklvnsly pdgskpvkvp enppsmvfkq meqvaqflka aedygviktd mfqtvdlfeg |
| 121 | kdmaavqrtl malgslavtk ndghyrgdpn wfmkkaqehk reftesqlqe gkhviglqmg |
| 181 | snrgasqagm tgygrprqii s |

| Lumican precursor (e.g., GenBank Accession Number NP 002336 | |
|---|---|
| (SEQ ID NO: 100)): | |
| 1 | mslsaftlfl aliggtsgqy ydydfplsiy gqsspncape cncpesypsa mycdelklks |
| 61 | vpmvppgiky lylrnnqidh idekafenvt dlqwlildhn llenskikgr vfsklkqlkk |
| 121 | lhinhnnlte svgplpksle dlqlthnkit klgsfeglvn ltfihlqhnr lkedavsaaf |
| 181 | kglksleyld lsfnqiarlp sglpvslltl yldnnkisni pdeyfkrfna lqylrlshne |
| 241 | ladsgipgns fnvsslveld lsynklknip tvnenlenyy levnqlekfd iksfckilgp |
| 301 | lsyskikhlr ldgnrisets lppdmyeclr vanevtln |

| Hemoglobin Beta (e.g., GenBank Accession Number NP 000509 | |
|---|---|
| (SEQ ID NO: 101)): | |
| 1 | mvhltpeeks avtalwgkvn vdevggealg rllvvypwtq rffesfgdls tpdavmgnpk |
| 61 | vkahgkkvlg afsdglahld nlkgtfatls elhcdklhvd penfrllgnv lvcvlahhfg |
| 121 | keftppvqaa yqkvvagvan alahkyh |

| Fibrinogen Beta Chain Precursor (e.g., GenBank Accession | |
|---|---|
| Number NP 005132 (SEQ ID NO: 102)): | |
| 1 | mkrmvswsfh klktmkhlll lllcvflvks qgvndneegf fsarghrpld kkreeapslr |
| 61 | papppisggg yrarpakaaa tqkkverkap daggclhadp dlgvlcptgc qlqeallqqe |
| 121 | rpirnsvdel nnnveavsqt ssssfqymyl lkdlwqkrqk qvkdnenvvn eysselekhq |
| 181 | lyidetvnsn iptnlrvlrs ilenirskiq klesdvsaqm eycrtpctvs cnipvvsgke |
| 241 | ceeiirkgge tsemyliqpd ssvkpyrvyc dmntenggwt viqnrqdgsv dfgrkwdpyk |
| 301 | qgfgnvatnt dgknycglpg eywlgndkis qltrmgptel liemedwkgd kvkahyggft |
| 361 | vqneankyqi svnkyrgtag nalmdgasql mgenrtmtih ngmffstydr dndgwltsdp |
| 421 | rkqcskedgg gwwynrchaa npngryywgg qytwdmakhg tddgvvwmnw kgswysmrkm |
| 481 | smkirpffpq q |

| Immunoglobulin kappa constant (IGKC) (e.g., GenBank Accession | |
|---|---|
| Number Q6GMX8 (SEQ ID NO: 103)): | |
| 1 | mdmrvpaqll gllllwfpgs rcdiqmtqsp ssvsasvgdr vtitcrasqg isswlawyqq |
| 61 | kpgkapklli yaasslqsgv psrfsgsgsg tdftltissl qpedfatyyc qqahsfpftf |
| 121 | gpgtkvdikr tvaapsvfif ppsdeqlksg tasvvcllnn fypreakvqw kvdnalqsgn |
| 181 | sqesvteqds kdstyslsst ltlskadyek hkvyacevth qglsspvtks fnrgec |

| Uncharacterized Protein ALB (e.g., GenBank Accession | |
|---|---|
| Number Q56G89 (SEQ ID NO: 104)): | |
| 1 | mkwvtfisll flfssaysrg vfrrdahkse vahrfkdlge enfkalvlia faqylqqcpf |
| 61 | edhvklvnev tefaktcvad esaencdksl htlfgdklct vatlretyge madccakqep |
| 121 | ernecflqhk ddnpnlprlv rpevdvmcta fhdneetflk kylyeiarrh pyfyapellf |
| 181 | fakrykaaft eccqaadkaa cllpkldelr degkassakq glkcaslqkf gerafkawav |
| 241 | arlsqrfpka efaevsklvt dltkvhtecc hgdllecadd radlakyice nqdsissklk |
| 301 | eccekpllek shciaevend empadlpsla adfvgskdvc knyaeakdvf lgmflyeyar |
| 361 | rhpdysvvll lrlaktyett lekccaaadp hecyakvfde fkplveepqn likqncelfe |
| 421 | qlgeykfqna llvrytkkvp qvstptlvev srnlgkvgsk cckhpeakrm pcaedclsvf |
| 481 | lnqlcvlhek tpvsdrvtkc cteslvngrp cfsalevdet yvpkefnaet ftfhadictl |
| 541 | sekerqikkg talvelvkhk pkatkeqlka vmddfaafve kcckaddket cfaeegkklv |
| 601 | aasqaalgl |

ApoA1 (e.g., GenBank Accession Number P02647 (SEQ ID NO: 105)):
MKAAVLTLAV LFLTGSQARH FWQQDEPPQS PWDRVKDLAT VYVDVLKDSG RDYVSQFEGS
ALGKQLNLKL LDNWDSVTST FSKLREQLGP VTQEFWDNLE KETEGLRQEM SKDLEEVKAK
VQPYLDDFQK KWQEEMELYR QKVEPLRAEL QEGARQKLHE LQEKLSPLGE EMRDRARAHV
DALRTHLAPY SDELRQRLAA RLEALKENGG ARLAEYHAKA TEHLSTLSEK AKPALEDLRQ
GLLPVLESFK VSFLSALEEY TKKLNTQ

C4A (e.g., GenBank Accession Number P0C0L4 (SEQ ID NO: 106)):
MRLLWGLIWA SSFFTLSLQK PRLLLFSPSV VHLGVPLSVG VQLQDVPRGQ VVKGSVFLRN
PSRNNVPCSP KVDFTLSSER DFALLSLQVP LKDAKSCGLH QLLRGPEVQL VAHSPWLKDS
LSRTTNIQGI NLLFSSRRGH LFLQTDQPIY NPGQRVRYRV FALDQKMRPS TDTITVMVEN
SHGLRVRKKE VYMPSSIFQD DFVIPDISEP GTWKISARFS DGLESNSSTQ FEVKKYVLPN
FEVKITPGKP YILTVPGHLD EMQLDIQARY IYGKPVQGVA YVRFGLLDED GKKTFFRGLE
SQTKLVNGQS HISLSKAEFQ DALEKLNMGI TDLQGLRLYV AAAIIESPGG EMEEAELTSW
YFVSSPFSLD LSKTKRHLVP GAPFLLQALV REMSGSPASG IPVKVSATVS SPGSVPEVQD
IQQNTDGSGQ VSIPIIIPQT ISELQLSVSA GSPHPAIARL TVAAPPSGGP GFLSIERPDS
RPPRVGDTLN LNLRAVGSGA TFSHYYYMIL SRGQIVFMNR EPKRTLTSVS VFVDHHLAPS
FYFVAFYYHG DHPVANSLRV DVQAGACEGK LELSVDGAKQ YRNGESVKLH LETDSLALVA
LGALDTALYA AGSKSHKPLN MGKVFEAMNS YDLGCGPGGG DSALQVFQAA GLAFSDGDQW
TLSRKRLSCP KEKTTRKKRN VNFQKAINEK LGQYASPTAK RCCQDGVTRL PMMRSCEQRA
ARVQQPDCRE PFLSCCQFAE SLRKKSRDKG QAGLQRALEI LQEEDLIDED DIPVRSFFPE
NWLWRVETVD RFQILTLWLP DSLTTWEIHG LSLSKTKGLC VATPVQLRVF REFHLHLRLP
MSVRRFEQLE LRPVLYNYLD KNLTVSVHVS PVEGLCLAGG GGLAQQVLVP AGSARPVAFS
VVPTAAAAVS LKVVARGSFE FPVGDAVSKV LQIEKEGAIH REELVYELNP LDHRGRTLEI
PGNSDPNMIP DGDFNSYVRV TASDPLDTLG SEGALSPGGV ASLLRLPRGC GEQTMIYLAP
TLAASRYLDK TEQWSTLPPE TKDHAVDLIQ KGYMRIQQFR KADGSYAAWL SRDSSTWLTA
FVLKVLSLAQ EQVGGSPEKL QETSNWLLSQ QQADGSFQDP CPVLDRSMQG GLVGNDETVA
LTAFVTIALH HGLAVFQDEG AEPLKQRVEA SISKANSFLG EKASAGLLGA HAAAITAYAL
SLTKAPVDLL GVAHNNLMAM AQETGDNLYW GSVTGSQSNA VSPTPAPRNP SDPMPQAPAL
WIETTAYALL HLLLHEGKAE MADQASAWLT RQGSFQGGFR STQDTVIALD ALSAYWIASH
TTEERGLNVT LSSTGRNGFK SHALQLNNRQ IRGLEEELQF SLGSKINVKV GGNSKGTLKV
LRTYNVLDMK NTTCQDLQIE VTVKGHVEYT MEANEDYEDY EYDELPAKDD PDAPLQPVTP
LQLFEGRRNR RRREAPKVVE EQESRVHYTV CIWRNGKVGL SGMAIADVTL LSGFHALRAD
LEKLTSLSDR YVSHFETEGP HVLLYFDSVP TSRECVGFEA VQEVPVGLVQ PASATLYDYY
NPERRCSVFY GAPSKSRLLA TLCSAEVCQC AEGKCPRQRR ALERGLQDED GYRMKFACYY
PRVEYGFQVK VLREDSRAAF RLFETKITQV LHFTKDVKAA ANQMRNFLVR ASCRLRLEPG
KEYLIMGLDG ATYDLEGHPQ YLLDSNSWIE EMPSERLCRS TRQRAACAQL NDFLQEYGTQ
GCQV

C3 187 kDa protein (e.g., GenBank Accession Number P01024
(SEQ ID NO: 107)):
MGPTSGPSLL LLLLTHLPLA LGSPMYSIIT PNILRLESEE TMVLEAHDAQ GDVPVTVTVH
DFPGKKLVLS SEKTVLTPAT NHMGNVTFTI PANREFKSEK GRNKFVTVQA TFGTQVVEKV
VLVSLQSGYL FIQTDKTIYT PGSTVLYRIF TVNHKLLPVG RTVMVNIENP EGIPVKQDSL
SSQNQLGVLP LSWDIPELVN MGQWKIRAYY ENSPQQVFST EFEVKEYVLP SFEVIVEPTE
KFYYIYNEKG LEVTITARFL YGKKVEGTAF VIFGIQDGEQ RISLPESLKR IPIEDGSGEV
VLSRKVLLDG VQNPRAEDLV GKSLYVSATV ILHSGSDMVQ AERSGIPIVT SPYQIHFTKT
PKYFKPGMPF DLMVFVTNPD GSPAYRVPVA VQGEDTVQSL TQGDGVAKLS INTHPSQKPL
SITVRTKKQE LSEAEQATRT MQALPYSTVG NSNNYLHLSV LRTELRPGET LNVNFLLRMD
RAHEAKIRYY TYLIMNKGRL LKAGRQVREP GQDLVVLPLS ITTDFIPSFR LVAYYTLIGA
SGQREVVADS VWVDVKDSCV GSLVVKSGQS EDRQPVPGQQ MTLKIEGDHG ARVVLVAVDK
GVFVLNKKNK LTQSKIWDVV EKADIGCTPG SGKDYAGVFS DAGLTFTSSS GQQTAQRAEL
QCPQPAARRR RSVQLTEKRM DKVGKYPKEL RKCCEDGMRE NPMRFSCQRR TRFISLGEAC
KKVFLDCCNY ITELRRQHAR ASHLGLARSN LDEDIIAEEN IVSRSEFPES WLWNVEDLKE
PPKNGISTKL MNIFLKDSIT TWEILAVSMS DKKGICVADP FEVTVMQDFF IDLRLPYSVV
RNEQVEIRAV LYNYRQNQEL KVRVELLHNP AFCSLATTKR RHQQTVTIPP KSSLSVPYVI
VPLKTGLQEV EVKAAVYHHF ISDGVRKSLK VVPEGIRMNK TVAVRTLDPE RLGREGVQKE
DIPPADLSDQ VPDTESETRI LLQGTPVAQM TEDAVDAERL KHLIVTPSGC GEQNMIGMTP
TVIAVHYLDE TEQWEKFGLE KRQGALELIK KGYTQQLAFR QPSSAFAAFV KRAPSTWLTA
YVVKVFSLAV NLIAIDSQVL CGAVKWLILE KQKPDGVFQE DAPVIHQEMI GGLRNNNEKD
MALTAFVLIS LQEAKDICEE QVNSLPGSIT KAGDFLEANY MNLQRSYTVA IAGYALAQMG
RLKGPLLNKF LTTAKDKNRW EDPGKQLYNV EATSYALLAL LQLKDFDFVP PVVRWLNEQR
YYGGGYGSTQ ATFMVFQALA QYQKDAPDHQ ELNLDVSLQL PSRSSKITHR IHWESASLLR
SEETKENEGF TVTAEGKGQG TLSVVTMYHA KAKDQLTCNK FDLKVTIKPA PETEKRPQDA
KNTMILEICT RYRGDQDATM SILDISMMTG FAPDTDDLKQ LANGVDRYIS KYELDKAFSD
RNTLIIYLDK VSHSEDDCLA FKVHQYFNVE LIQPGAVKVY AYYNLEESCT RFYHPEKEDG
KLNKLCRDEL CRCAEENCFI QKSDDKVTLE ERLDKACEPG VDYVYKTRLV KVQLSNDFDE
YIMAIEQTIK SGSDEVQVGQ QRTFISPIKC REALKLEEKK HYLMWGLSSD FWGEKPNLSY
IIGKDTWVEH WPEEDECQDE ENQKQCQDLG AFTESMVVFG CPN

Actin, Cytoplasmic 1 (actin beta)
(e.g., GenBank Accession Number
NP 001092 (SEQ ID NO: 108):
>refseqp|NP_001092|NP_001092 beta actin
[Homo sapiens].
MDDDIAALVVDNGSGMCKAGFAGDDAPRAVFPSIVGRPRHQGVMVGMGQ
KDSYVGDEAQSKRGILTLKYPIEHGIVTNWDDMEKIWHHTFYNELRVAP
EEHPVLLTEAPLNPKANREKMTQIMFETFNTPAMYVAIQAVLSLYASGR
TTGIVMDSGDGVTHTVPIYEGYALPHAILRLDLAGRDLTDYLMKILTER
GYSFTTTAEREIVRDIKEKLCYVALDFEQEMATAASSSSLEKSYELPDG
QVITIGNERFRCPEALFQPSFLGMESCGIHETTFNSIMKCDVDIRKDLY
ANTVLSGGTTMYPGIADRMQKEITALAPSTMKIKIIAPPERKYSVWIGG
SLASLSTFQQMWISKQEYDESGPSIVHRKCF

Hemoglobin beta (e.g., GenBank Accession
Number O95408 (SEQ ID NO: 109):
>uniprot|095408|095408_HUMAN Beta globin;
MVHLTPEEKSAVTALWGKVNVDEVGGEALGRLLVIYPWTQRFFESFGDL
STPDAVMG

Hemoglobin subunit alpha (e.g., GenBank Accession
Number P69905 (SEQ ID NO: 110):
>uniprot|P69905|HBA_HUMAN Hemoglobin
subunit alpha;
MVLSPADKTNVKAAWGKVGAHAGEYGAEALERMFLSFPTTKTYFPHFDL
SHGSAQVKGHGKKVADALTNAVAHVDDMPNALSALSDLHAHKLRVDPVN
FKLLSHCLLVTLAAHLPAEFTPAVHASLDKFLASVSTVLTSKYR

POTE-2 alpha actin (e.g., GenBank Accession
Number A5A3E0 (SEQ ID NO: 111):
>uniprot|A5A3E0|POTEF_HUMAN POTE ankyrin
domain family member F;
MVVEVDSMPAASSVKKPFGLRSKMGKWCCRCFPCCRESGKSNVGTSGDH
DDSAMKTLRSKMGKWCRHCFPCCRGSGKSNVGASGDHDDSAMKTLRNKM
GKWCCHCFPCCRGSSKSKVGAWGDYDDSAFMEPRYHVRGEDLDKLHRAA
WWGKVPRKDLIVMLRDTDVNKQDKQKRTALHLASANGNSEVVKLLLDRR
CQLNVLDNKKRTALIKAVQCQEDECALMLLEHGTDPNIPDEYGNTTLHY
AIYNEDKLMAKALLLYGADIESKNKHGLTPLLLGVHEQKQQVVKFLIKK
KANLNALDRYGRTALILAVCCGSASIVSLLLEQNIDVSSQDLSGQTARE
YAVSSHHHVICQLLSDYKEKQMLKISSENSNPEQDLKLTSEEESQRFKG
SENSQPEKMSQEPEINKDGDREVEEEMKKHESNNVGLLENLTNGVTAGN
GDNGLIPQRKSRTPENQQFPDNESEEYHRICELLSDYKEKQMPKYSSEN
SNPEQDLKLTSEEESQRLKGSENGQPEKRSQEPEINKDGDRELENFMAI
EEMKKHRSTHVGFPENLTNGATAGNGDDGLIPPRKSRTPESQQFPDTEN
EEYHSDEQNDTQKQFCEEQNTGILHDEILIHEEKQIEVVEKMNSELSLS
CKKEKDILHENSTLREEIAMLRLELDTMKHQSQLREKKYLEDIESVKKR
NDNLLKALQLNELTMDDDTAVLVIDNGSGMCKAGFAGDDAPRAVFPSIV
GRPRQQGMMGGMHQKESYVGKEAQSKRGILTLKYPMEHGIITNWDDMEK
IWHHTFYNELRVAPEEHPVLLTEATLNPKANREKMTQIMFETFNTPAMY
VAIQAVLSLYTSGRTTGIVMDSGDGVTHTVPIYEGNALPHATLRLDLAG
RELPDYLMKILTEHGYRFTTMAEREIVRDIKEKLCYVALDFEQEMATVA
SSSSLEKSYELPDGQVITIGNERFRCPEALFQPCFLGMESCGIHETTFN
SIMKSDVDIRKDLYTNTVLSGGTTMYPGMAHRMQKEIAALAPSMMKIRI
IAPPKRKYSVWVGGSILASLSTFQQMWISKQEYDESGPSIVHRKCL

SLC4A10 (e.g., GenBank Accession
Number Q6U841 (SEQ ID NO: 112):
>uniprot|Q6U841|S4A10_HUMAN Sodium-driven
chloride bicarbonate exchanger;
MEIKDQGAQMEPLLPTRNDEEAVVDRGGTRSILKTHFEKEDLEGHRTLF
IGVHVPLGGRKSHRRHRHRGHKHRKRDRERDSGLEDGRESPSFDTPSQR
VQFILGTEDDDEEHIPHDLFTELDEICWREGEDAEWRETARWLKFEEDV
EDGGERWSKPYVATLSLHSLFELRSCILNGTVLLDMHANTLEEIADMVL
DQQVSSGQLNEDVRHRVHEALMKQHHHQNQKKLTNRIPIVRSFADIGKK
QSEPNSMDKNAGQVVSPQSAPACVENKNDVSRENSTVDFSKGLGGQQKG
HTSPCGMKQRHEKGPPHQQEREVDLHFMKKIPPGAEASNILVGELEFLD
RTVVAFVRLSPAVLLQGLAEVPIPTRFLFILLGPLGKGQQYHEIGRSIA
TLMTDEVFHDVAYKAKDRNDLVSGIDEFLDQVTVLPPGEWDPSIRIEPP
KNVPSQEKRKIPAVPNGTAAHGEAEPHGGHSGPELQRTGRIFGGLILDI
KRKAPYFWSDFRDAFSLQCLASFLFLYCACMSPVITFGGLLGEATEGRI
SAIESLFGASMTGIAYSLFGGQPLTILGSTGPVLVFEKILFKFCKEYGL
SYLSLRASIGLWTATLCIILVATDASSLVCYITRFTEEAFASLICIIFI
YEALEKLFELSEAYPINMHNDLELLTQYSCNCVEPHNPSNGTLKEWRES
NISASDIIWENLTVSECKSLHGEYVGRACGHDHPYVPDVLFWSVILFFS
TVTLSATLKQFKTSRYFPTKVRSIVSDFAVFLTILCMVLIDYAIGIPSP
KLQVPSVFKPTRDDRGWFVTPLGPNPWWTVIAAIIPALLCTILIFMDQQ
ITAVIINRKEHKLKKGCGYHLDLLMVAVMLGVCSIMGLPWFVAATVLSI
THVNSLKLESECSAPGEQPKFLGIREQRVTGLMIFILMGSSVFMTSILK
FIPMPVLYGVFLYMGASSLKGIQFFDRIKLFWMPAKHQPDFIYLRHVPL
RKVHLFTIIQMSCLGLLWIIKVSRAAIVFPMMVLALVFVRKLMDLLFTK
RELSWLDDLMPESKKKKLEDAEKEEEQSMLAMEDEGTVQLPLEGHYRDD
PSVINISDEMSKTALWRNLLITADNSKDKESSFPSKSSPS

Ribonuclease P Protein Subunit P20 (POP7) (e.g.,
GenBank Accession Number Q75817 (SEQ ID NO: 113)
>uniprot|075817|POP7_HUMAN Ribonuclease P protein subunit p20;
MAENREPRGAVEAELDPVEYTLRKRLPSRLPRRPNDIYVNMKTDFKAQLARCQKLLDGGA
RGQNACSEIYIHGLGLAINRAINIALQLQAGSFGSLQVAANTSTVELVDELEPETDTREP
LTRIRNNSAIHIRVFRVTPK

Nuclear RNA export factor 1 (NXF1)(e.g., GenBank
Accession Number Q59E96 (SEQ ID NO: 114):
>uniprot|Q59E96|Q59E96_HUMAN Nuclear RNA export factor 1 variant;
RPAPEPALDLRCGMADEGKSYSEHDDERVNFPQRKKKGRGPFRWKYGEGNRRSGRGGSGI
RSSRLEEDDGDVAMSDAQDGPRVRYNPYTTRPNRRGDTWHDRDRIHVTVRRDRAPPERGG
AGTSQDGTSKNWFKITIPYGRKYDNAWLLSMIQSKCSVPFTPIEFHYENTRAQFFVEDAS
TASALEAVNYKILDRENRRISIIINSSAPPHTILNELKPEQVEQLKLIMSKRYDGSQQAL
DLKGLRSDPDLVAQNIDVVLNRRSCMAATLRIIEENIPELLSLNLSNNRLYRLDDMSSIV
QKAPNLKILNLSGNELKSERELDKIKGLKLEELWLDGNSLCDTFRDQSTYIRSVVACVSP
PGDLHPLGG

UVEAL Autoantigen With Coiled-Coil Domains And Ankyrin Repeats,
UACA (e.g., GenBank Accession Number Q05DB3 (SEQ ID NO: 115):
>uniprot|Q05DB3|Q05DB3_HUMAN UACA protein;
MMNCWFSCTPKNRHAADWNKYDDRLMKAAERGDVEKVTSILAKKGVNPGKLDVEGRSVFH
VVTSKGNLECLNAILIHGVDITTSDTAGRNALHLAAKYGHALCLQKLLQYNCPTEHADLQ
GRTALHDAAMADCPSSIQLLCDHGASVNAKDVDGRTPLVLATQMSRPTICQLLIDRGADV
NSRDKQNRTALMLGCEYGCRDAVEVLIKNGADISLLDALGHDSSYYARIGDNLDILTLLK
TASENTNKGRELWKKGPSLQQRNLTHMQDEVNVKSHQREHQNIQDLEIENEDLKERLRKI
QQEQRILLDKVNGLQLQLNEEVMVADDLESEREKLKSLLAAKEKQHEESLRTIEALKNRF
KYFESDHLGSGSHFSNRKEDMLLKQGQMYMADSQCTSPGIPAHMQSRSMLRPLELSLPSQ
TSYSENEILKKFLEAMRTFCESAKQDRLKLQNELAHKVAECKALALECERVKEDSDEQIK
QLEDALKDVQKRMYESEGKVKQMQTHFLALKEHLTSEAASGNHRLTEELKDQLKDLKVKY
EGASAEVGKLRNQIKQNEMIVEEFKRDEGKLIEENKRLQKELSMCEMEREKKGRKVTEME
GQAKELSAKLALSIPAEKFENMKSSLSNEVNEKAKKKK

Uncharacterized Protein C13ORF27 (e.g., GenBank
Accession Number Q5JUR7(SEQ ID NO: 116):
>uniprot|Q5JUR7|CM027_HUMAN Uncharacterized protein C13orf27;
MSHTEVKLKIPFGNKLLDAVCLVPNKSLTYGIILTHGASGDMNLPHLMSLASHLASHGFF
CLRFTCKGLNIVHRIKAYKSVLNYLKTSGEYKLAGVFLGGRSMGSRAAASVMCHIEPDDG
DDFVRGLICISYPLHHPKQQHKLRDEDLFRLKEPVLFVSGSADEMCEKNLLEKVAQKMQA
PHKIHWIEKANHSMAVKGRSTNDVFKEINTQILFWIQEITEMDKKCH

Isoform 3 of Sushi, Nidogen And EGF-Like Domain-Containing
Protein 1 Precursor (e.g., GenBank Accession Number
Q8TER0 (SEQ ID NO: 117):
>swissprot|Q8TER0|SNED1_HUMAN Sushi, nidogen
and EGF-like domain-containing protein 1;
MRHGVAWALLVAAALGLGARGVRGAVALADFYPFGAERGDAVTPKQDDGGSGLRPLSVPF
PFFGAEHSGLYVNNNGIISFLKEVSQFTPVAFPIAKDRCVVAAFWADVDNRRAGDVYYRE
ATDPAMLRRATEDVRHYFPELLDFNATWVFVATWYRVTFFGGSSSSPVNTFQTVLITDGK
LSFTIFNYESIVWTTGTHASSGGNATGLGGIAAQAGFNAGDGQRYFSIPGSRTADMAEVE
TTTNVGVPGRWAFRIDDAQVRVGGCGHTTSVCLALRPCLNGGKCIDDCVTGNPSYTCSCL
SGFTGRRCHLDVNECASQPCQNGGTCTHGINSFRCQCPAGFGGPTCETAQSPCDTKECQH
GGQCQVENGSAVCVCQAGYTGAACEMDVDDCSPDPCLNGGSCVDLVGNYTCLCAEPFKGL
RCETGDHPVPDACLSAPCHNGGTCVDADQGYVCECPEGFMGLDCRERVPDDCECRNGGRC
LGANTTLCQCPLGFFGLLCEFEITAMPCNMNTQCPDGGYCMEHGGSYLCVCHTDHNASHS
LPSPCDSDPCFNGGSCDAHDDSYTCECPRGFHGKHCEKARPHLCSSGPCRNGGTCKEAGG
EYHCSCPYRFTGRHCEIGKPDSCASGPCHNGGTCFHYIGKYKCDCPPGFSGRHCEIAPSP
CFRSPCVNGGTCEDRDTDFFCHCQAGYMGRRCQAEVDCGPPEEVKHATLRFNGTRLGAVA
LYACDRGYSLSAPSRIRVCQPHGVWSEPPQCLEIDECRSQPCLHGGSCQDRVAGYLCLCS
TGYEGAHCELERDECRAHPCRNGGSCRNLPGAYVCRCPAGFVGVHCETEVDACDSSPCQH
GGRCESGGGAYLCVCPESFFGYHCETVSDPCFSSPCGGRGYCLASNGSHSCTCKVGYTGE
DCAKELFPPTALKMERVEESGVSISWNPPNGPAARQMLDGYAVTYVSSDGSYRRTDFVDR
TRSSHQLQALAAGRAYNISVFSVKRNSNNKNDISRPAVLLARTRPRPVEGFEVTNVTAST
ISVQWALHRIRHATVSGVRVSIRHPEALRDQATDVDRSVDRFTFRALLPGKRYTIQLTTL
SGLRGEEHPTESLATAPTHVWTRPLPPANLTAARVTATSAHVVWDAPTPGSLLEAYVINV
TTSQSTKSRYVPNGKLASYTVRDLLPGRRYQLSVIAVQSTELGPQHSEPAHLYIITSPRD
GADRRWHQGGHHPRVLKNRPPPARLPELRLLNDHSAPETPTQPPRFSELVDGRGRVSARF
GGSPSKAATVRSQPTASAQLENMEEAPYRVSLALQLPEHGSKDIGNVPGNCSENPCQNGG
TCVPGADAHSCDCGPGFKGRRCELACIKVSRPCTRLFSETKAFPVWEGGVCHHVYKRVYR
VHQDICFKESCESTSLKKTPNRKQSKSQTLEKS

Isoform 1 Of Dynein Heavy Chain 10, Axonemal (DNAH10):
(e.g., GenBank Accession Number Q8IVF4 (SEQ ID NO: 118):
>uniprot|Q8IVF4|DYR10_HUMAN Dynein heavy chain 10, axonemal;
MVPEEVEVEIDEIPVLSEEGEEEEETYSQKVESVDKVRAKRVSLRTESLGQPLNREDEEM
DKEISEKLPSKRTAKHIMEKMHLHMLCTPLPEEFLDQNVVFFLRNTKEAISEATDMKEAM
EIMPETLEYGIINANVLHFLKNIICQVFLPALSFNQHRTSTTVGVTSGEVSNSSEHESDL
PPMPGEAVEYHSIQLIRDEFLMNVQKFASNIQRTMQQLEGELKLEMPIISVEGEVSDLAA
DPETVDILEQCVINWLNQISTAVEAQLKKTPQGKGPLAEIEFWRERNATLSALHEQTKLP
IVRKVLDVIKESDSMLVANLQPVFTELFKFHTEASDNVRFLSTVERYFKNITHGSGFHVV
LDTIPAMMSALRMVWIISRHYNKDERMIPLMERIAWEIAERVCRVVNLRTLFKENRASAQ
SKTLEARNTLRLWKKAYFDTRAKTEASGREDRWEFDRKRLFERTDYMATICQDLSDVLQV
LEEFYNIFGPELKAVTGDPKRIDDVLCRVDGLVTPMENLTFDPFSIKSSQFWKYVMDEFK
IEVLIDIINKIFVQNLENPPLYKNHPPVAGAIYWERSLFFRIKHTILRFQEVQEILDSDR
GQEVKQKYLEVGRTMKEYEDRKYEQWMEVTEQVLPALMKKSLLTKSSIATEEPSTLERGA
VFAINFSPALREIINETKYLEQLGFTVPELARNVALQEDKFLRYTAGIQRMLDHYHMLIG
TLNDAESVLLKDHSQELLRVFRSGYKRLNWNSLGTGDYITGCKQAIGKFESLVHQIHKNA
DDISSRLTLIEAINLFKYPAAKSEEELPGVKEFFEHIERERASDVDHMVRWYLAIGPLLT
KVEGLVVHTNTGKAPKLASYYKYWEKKIYEVLTKLILKNLQSFNSLILGNVPLFHTETIL
TAPEIILHPNTNEIDKMCFHCVRNCVEITKHFVRWMNGSCIECPPQKGEEEEVVIINFYN
DISLNPQIIEQAVMIPQNVHRILINLMKYLQKWKRYRPLWKLDKAIVMEKFAAKKPPCVA
YDEKLQFYSKIAYEVMRHPLIKDEHCIRLQLRHLANTVQENAKSWVISLGKLLNESAKEE
LYNLHEEMEHLAKNLRKIPNTLEDLKFVLATIAEIRSKSLVMELRYRDVQERYRTMAMYN
LFPPDAEKELVDKIESIWSNLFNDSVNVEHALGDIKRTFTELTRGEIMMYRVQIEEFAKR
FYSEGPGSVGDDLDKGVELLGVYERELARHEKSRQELANAEKLFDLPITMYPELLKVQKE
MSGLRMIYELYEGLKVAKEEWSQTLWINLNVQILQEGIEGFLRALRKLPRPVRGLSVTYY
LEAKMKAFKDSIPLLLDLKNEALRDRHWKELMEKTSVFFEMTETFTLENMFAMELHKHTD
VLNEIVTAAIKEVAIEKAVKEILDTWENMKFTVVKYCKGTQERGYILGSVDEIIQSLDDN
TFNLQSISGSRFVGPFLQTVHKWEKTLSLIGEVIEIWMLVQRKWMYLESIFIGGDIRSQL
PEEAKKFDNIDKVFKRIMGETLKDPVIKRCCEAPNRLSDLQNVSEGLEKCQKSLNDYLDS
KRNAFPRFFFISDDELLSILGSSDPLCVQEHMIKMYDNIASLRFNDGDSGEKLVSAMISA
EGEVMEFRKIVRAEGRVEDWMTAVLNEMRRTNRLITKEAIFRYCEDRSRVDWMLLYQGMV
VLAASQVWWTWEVEDVFHKAQKGEKQAMKNYGRKMHRQIDELVTRITMPLSKNDRKKYNT
VLIIDVHARDIVDSFIRGSILEAREFDWESQLRFYWDREPDELNIRQCTGTFGYGYEYMG
LNGRLVITPLTDRIYLTLTQALSMYLGGAPAGPAGTGKTETTKDLAKALGLLCVVTNCGE
GMDYRAVGKIFSGLAQCGAWGCFDEFNRIDASVLSVISSQIQTIRNALIHQLTTFQFEGQ
EISLDSRMGIFITMNPGYAGRTELPESVKALFRPVVVIVPDLQQICEIMLFSEGFLEAKT
LAKKMTVLYKLAREQLSKQYHYDFGLRALKSVLVMAGELKRGSSDLREDVVLMRALRDMN
LPKFVFEDVPLFLGLISDLFPGLDCPRVRYPDFNDAVEQVLEENGYAVLPIQVDKVVQMF
ETMLTRHTTMVVGPTRGGKSVVINTLCQAQTKLGLTTKLYILNPKAVSVIELYGILDPTT
RDWTDGVLSNIFREINKPTDKKERKYILFDGDVDALWVENMNSVMDDNRLLTLANGERIR
LQAHCALLFEVGDLQYASPATVSRCGMVYVDPKNLKYRPYWKKWVNQIPNKVEQYNLNSL
FEKYVPYLMDVIVEGIVDGRQAEKLKTIVPQTDLNMVTQLAKMLDALLEGEIEDLDLLEC
YFLEALYCSLGASLLEDGRMKFDEYIKRLASLSTVDTEGVWANPGELPGQLPTLYDFHFD
NKRNQWVPWSKLVPEYIHAPERKFINILVHTVDTTRTTWILEQMVKIKQPVIFVGESGTS
KTATTQNFLKNLSEETNIVLMVNFSSRTTSMDIQRNLEANVEKRTKDTYGPPMGKRLLVF
MDDMNMPRVDEYGTQQPIALLKLLLEKGYLYDRGKELNCKSIRDLGFIAAMGKAGGGRNE
VDPRFISLFSVFNVPFPSEESLHLIYSSILKGHTSTFHESIVAVSGKLTFCTLALYKNIV
QDLPPTPSKFHYIFNLRDLSRVFNGLVLTNPERFQTVAQMVRVWRNECLRVFHDRLISET
DKQLVQQHIGSLVVEHFKDDVEVVMRDPILFGDFQMALHEGEPRIYEDIQDYEAAKALFQ
EILEEYNESNTKMNLVLFDDALEHLTRVHRIIRMDRGHALLVGVGGSGKQSLSRLAAFTA
SCEVFEILLSRGYSENSFREDLKSLYLKLGIENKAMIFLFTDAHVAEEGFLELINNMLTS
GIVPALFSEEEKESILSQIGQEALKQGMGPAKESVWQYFVNKSANNLHIVLGMSPVGDTL
RTWCRNFPGMVNNTGIDWFMPWPPQALHAVAKSFLGYNPMIPAENIENVVKHVVLVHQSV
DHYSQQFLQKLRRSNYVTPKNYLDFINTYSKLLDEKTQCNIAQCKRLDGGLDKLKEATIQ
LDELNQKLAEQKIVLAEKSAACEALLEEIAVNTAVAEEKKKLAEEKAMEIEEQNKVIAME
KAEAETTLAEVMPILEAAKLELQKLDKSDVTEIRSFAKPPKQVQTVCECILIMKGYKELN
WKTAKGVMSDPNFLRSLMEIDFDSITQSQVKNIKGLLKTLNTTTEEMEAVSKAGLGMLKF
VEAVMGYCDVFREIKPKREKVARLERNFYLTKRELERIQNELAAIQKELETLGAKYEAAI
LEKQKLQEEAEIMERRLIAADKLISGLGSENIRWLNDLDELMHRRVKLLGDCLLCAAFLS
YEGAFTWEFRDEMVNRIWQNDILEREIPLSQPFRLESLLTDDVEISRWGSQGLPPDELSV
QNGILTTRASRFPLCIDPQQQALNWIKRKEEKNNLRVASFNDPDFLKQLEMSIKYGTPFL
FRDVDEYIDPVIDNVLEKNIKVSQGRQFIILGDKEVDYDSNFRLYLNTKLANPRYSPSVF
GKAMVINYTVTLKGLEDQLLSVLVAYERRELEEQREHLIQETSENKNLLKDLEDSLLREL
ATSTGNMLDNVDLVHTLEETKSKATEVSEKLKLAEKTALDIDRLRDGYRPAARRGAILFF
VLSEMALVNSMYQYSLIAFLEVFRLSLKKSLPDSILMKRLRNIMDTLTFSIYNHGCTGLF
ERHKLLFSFNMTIKIEQAEGRVPQEELDFFLKGNISLEKSKRKKPCAWLSDQGWEDIILL
SEMFSDNFGQLPDDVENNQTVWQEWYDLDSLEQFPVPLGYDNNITPFQKLLILRCFRVDR
VYRAVTDYVTVTMGEKYVQPPMISFEAIFEQSTPHSPIVFILSPGSDPATDLMKLAERSG
FGGNRLKFLAMGQGQEKVALQLLETAVARGQWLMLQNCHLLVKWLKDLEKSLERITKPHP
DFRLWLTTDPTKGFPIGILQKSLKVVTEPPNGLKLNMRATYFKISHEMLDQCPHPAFKPL
VYVLAFFHAVVQERRKFGKIGWNVYYDFNESDFQVCMEILNTYLTKAFQQRDPRIPWGSL
KYLIGEVMYGGRAIDSFDRRILTIYMDEYLGDFIFDTFQPFHFFRNKEVDYKIPVGDEKE
KFVEAIEALPLANTPEVFGLHPNAEIGYYTQAARDMWAHLLELQPQTGESSSGISRDDYI
GQVAKEIENKMPKVFDLDQVRKRLGTGLSPTSVVLLQELERFNKLVVRMTKSLAELQRAL
AGEVGMSNELDDVARSLFIGHIPNIWRRLAPDTLKSLGNWMVYFLRRFSQYMLWVTESEP
SVMWLSGLHIPESYLTALVQATCRKNGWPLDRSTLFTQVTKFQDADEVNERAGQGCFVSG
LYLEGADWDIEKGCLIKSKPKVLVVDLPILKIIPIEAHRLKLQNTFRTPVYTTSMRRNAM
GVGLVFEADLFTTRHISHWVLQGVCLTLNSD

Gap junction alpha-1 protein (GJA1/Connexion 43) (e.g.,
GenBank Accession Number P17302 (SEQ ID NO: 119):
>uniprot|P17302|CXA1_HUMAN Gap junction alpha-1 protein;
MGDWSALGKLLDKVQAYSTAGGKVWLSVLFIFRILLLGTAVESAWGDEQSAFRCNTQQPG
CENVCYDKSFPISHVRFWVLQIIFVSVPTLLYLAHVFYVMRKEEKLNKKEEELKVAQTDG
VNVDMHLKQIEIKKFKYGIEEHGKVKMRGGLLRTYIISILFKSIFEVAFLLIQWYIYGFS
LSAVYTCKRDPCPHQVDCFLSRPTEKTIFIIFMLVVSLVSLALNIIELFYVFFKGVKDRV
KGKSDPYHATSGALSPAKDCGSQKYAYFNGCSSPTAPLSPMSPPGYKLVTGDRNNSSCRN
YNKQASEQNWANYSAEQNRMGQAGSTISNSHAQPFDFPDDNQNSKKLAAGHELQPLAIVD
QRPSSRASSRASSRPRPDDLEI

Isoform 1 Of Kinesin-Like Protein KIF25(KIF25) (e.g.,
GenBank Accession Number Q5SZU8 (SEQ ID NO: 120):
>uniprot|Q5SZU8|Q5SZU8_HUMAN Kinesin family member 25;
CRAVGSASKLMELVHGGLQLRAKHPTLVHADSSRSHLIITVTLTTASCSDSTADQACSAT
LPREQTEAGRAGRSRRASQGALAPQLVPGNPAGHAEQVQARLQLVDSAGSECVGGDAKLL
VILCISPSQRHLAQTLQGLGFGIRARQVQRGPARKKPPSSQTEGKRRPD

GAPDH-Glyceraldehyde-3-Phosphate Dehydrogenase
(e.g., GenBank Accession Number P04406 (SEQ ID NO: 121):
>uniprot|P04406|G3P_HUMAN Glyceraldehyde-3-phosphate dehydrogenase;
MGKVKVGVNGFGRIGRLVTRAAFNSGKVDIVAINDPFIDLNYMVYMFQYDSTHGKFHGTV
KAENGKLVINGNPITIFQERDPSKIKWGDAGAEYVVESTGVFTTMEKAGAHLQGGAKRVI
ISAPSADAPMFVMGVNHEKYDNSLKIISNASCTTNCLAPLAKVIHDNFGIVEGLMTTVHA
ITATQKTVDGPSGKLWRDGRGALQNIIPASTGAAKAVGKVIPELNGKLTGMAFRVPTANV
SVVDLTCRLEKPAKYDDIKKVVKQASEGPLKGILGYTEHQVVSSDFNSDTHSSTFDAGAG
IALNDHFVKLISWYDNEFGYSNRVVDLMAHMASKE

Uncharacterized Protein ALB (e.g.,
GenBank Accession Number P02768 (SEQ ID NO: 122):
>uniprot|P02768|ALBU_HUMAN Serum albumin;
MKWVTFISLLFLFSSAYSRGVFRRDAHKSEVAHRFKDLGEENFKALVLIAFAQYLQQCPF
EDHVKLVNEVTEFAKTCVADESAENCDKSLHTLFGDKLCTVATLRETYGEMADCCAKQEP
ERNECFLQHKDDNPNLPRLVRPEVDVMCTAFHDNEETFLKKYLYEIARRHPYFYAPELLF
FAKRYKAAFTECCQAADKAACLLPKLDELRDEGKASSAKQRLKCASLQKFGERAFKAWAV
ARLSQRFPKAEFAEVSKLVTDLTKVHTECCHGDLLECADDRADLAKYICENQDSISSKLK
ECCEKPLLEKSHCIAEVENDEMPADLPSLAADFVESKDVCKNYAEAKDVFLGMFLYEYAR
RHPDYSVVLLLRLAKTYETTLEKCCAAADPHECYAKVFDEFKPLVEEPQNLIKQNCELFE
QLGEYKFQNALLVRYTKKVPQVSTPTLVEVSRNLGKVGSKCCKHPEAKRMPCAEDYLSVV
LNQLCVLHEKTPVSDRVTKCCTESLVNRRPCFSALEVDETYVPKEFNAETFTFHADICTL
SEKERQIKKQTALVELVKHKPKATKEQLKAVMDDFAAFVEKCCKADDKETCFAEEGKKLV
AASQAALGL

Galectin-3, LGALS3 (e.g., GenBank Accession
Number NP_002297(SEQ ID NO: 123)
>refseqp|NP_002297|NP_002297 galectin 3 [Homo sapiens].
[sequence omitted]

Similar To NAC-Alpha Domain-Containing Protein 1 (NACAD)
(e.g., GenBank Accession Number O15069 (SEQ ID NO: 124):
>uniprot|O15069|NACAD_HUMAN NAC-alpha domain-containing
protein 1;
MPGEAARAELLLPEADRPGPRTDLSCDAAAATTILGGDRREPCALTPGPSHLALTFLPSK
PGARPQPEGASWDAGPGGAPSAWADPGEGGPSPMLLPEGLSSQALSTEAPLPATLEPRIV
MGEETCQALLSPRAARTALRDQEGGHASPDPPPELCSQGDLSVPSPPPDPDSFFTPPSTP
TKTTYALLPACGPHGDARDSEAELRDELLDSPPASPSGSYITADGDSWASSPSCSLSLLA
PAEGLDFPSGWGLSPQGSMVDERELHPAGTPEPPSSESSLSADSSSSWGQEGHFFDLDFL
ANDPMIPAALLPFQGSLIFOVEAVEVTPLSPEEEEEEAVADPDPGGDLAGEGEEDSTSAS
FLQSLSDLSITEGMDEAFAFRDDTSAASSDSDSASYAEADDERLYSGEPHAQATLLQDSV
QKTEEESGGGAKGLQAQDGTVSWAVEAAPQTSDRGAYLSQRQELISEVTEEGLALGQEST
ATVTPHTLQVAPGLQVEVATRVTPQAGEEETDSTAGQESAAMAMPQPSQEGISEILGQES
VTAEKLPTPQEETSLTLCPDSPQNLKEEGGLDLPSGRKPVAAATIVPRQAKEDLTLPQDS
AMTPPLPLQDTDLSSAPKPVAAATIVSQQAEEGLTLPQDSVMTPPLPLQDTELSSAPKPV
AAATLVSQQAEEGLTLPQDSAMTPPLPLQDTDLSSAPKPVAAATLVSQQAEEGLTLPQDS
AMTPPLPLQDTDLSSAPKPVAAATLVSQQAEEGLTLPQDSAMTPPLPLQDTDLSSAPKPV
AAATIVSQQAEEGLTLPQDSAMTPPLPLQDTDLSSAPKPVAAATIVSQQAEEGLTLPQDS
AMTPPLPLQDTDLSSAPKPVAAATPVSQQAEEGLTLPQDSAMTPPLPLQDTDLSSAPKPV
AAATPVSQQAEEGLTLPQDSAMTAPLPLQDTGPTSGPEPLAVATPQTLQAEAGCAPGTEP
VATMAQQEVGEALGPRPAPEEKNAALPTVPEPAALDQVQQDDPQPAAEAGTPWAAQEDAD
STLGMEALSLPEPASGAGEEIAEALSRPGREACLEARAHTGDGAKPDSPQKETLEVENQQ
EGGLKLLAQEHGPRSALGGAREVPDAPPAACPEVSQARLLSPAREERGLSGKSTPEPTLP
SAVATEASLDSCPESSVGAVSSLDRGCPDAPAPTSAPTSQQPEPVLGLGSVEQPHEVPSV
LGTPLLQPPENLAKGQPSTPVDRPLGPDPSAPGTLAGAALPPLEPPAPCLCQDPQEDSVE
DEEPPGSLGLPPPQAGVQPAAAAVSGTTQPLGTGPRVSLSPHSPLLSPKVASMDAKDLAL
QILPPCQVPPPSGPQSPAGPQGLSAPEQQEDEDSLEEDSPRALGSGQHSDSHGESSAELD
EQDILAPQTVQCPAQAPAGGSEETIAKAKQSRSEKKARKAMSKLGLRQIQGVTRITIQKS
KNILFVIAKPDVFKSPASDTYVVFGEAKIEDLSQQVHKAAAEKFKVPSEPSALVPESAPR
PRVRLECKEEEEEEEEEVDEAGLELRDIELVMAQANVSRAKAVRALRDNHSDIVNAIMEL
TM

Acetyl-CoA Acetyltransferase, Mitochondrial , ACATI (e.g.,
GenBank Accession Number NP_000010 (SEQ ID NO: 125):
>refseqp|NP_000010|NP_000010 acetyl-Coenzyme
A acetyltransferase 1 precursor [Homo sapiens].
MAVLAALLRSGARSRSPLLRRLVQEIRYVERSYVSKPTLKEVVIVSATRTPIGSFLGSLS
LLPATKLGSIAIQGAIEKAGIPKEEVKEAYMGNVLQGGEGQAPTRQAVLGAGLPISTPCT
TINKVCASGMKAIMMASQSLMCGHQDVMVAGGMESMSNVPYVMNRGSTPYGGVKLEDLIV
KDGLTDVYNKIHMGSCAENTAKKLNIARNEQDAYAINSYTRSKAAWEAGKFGNEVIPVTV
TVKGQPDVVVKEDEEYKRVDFSKVPKLKTVFQKENGTVTAANASTLNDGAAALVLMTADA
AKRLNVTPLARIVAFADAAVEPIDFPIAPVYAASMVLKDVGLKKEDIAMWEVNEAFSLVV
LANIKMLEIDPQKVNINGGAVSLGHPIGMSGARIVGHLTHALKQGEYGLASICNGGGGAS
AMLIQKL

KH-Type Splicing Regulatory Protein, FUBP2 (e.g.,
GenBank Accession Number NP_003676 (SEQ ID NO: 126):
>refseqp|NP_003676|NP_003676 KH-type splicing regulatory
protein (FUSE binding protein 2) [Homo sapiens].
MSDYSTGGPPPGPPPPAGGGGGAGGAGGGPPPGPPGAGDRGGGGPGGGGPGGGSAGGPSQ
PPGGGGPGIRKDAFADAVQRARQIAAKIGGDAATTVNNSTPDFGFGGQKRQLEDGDQPES
KKLASQGDSISSQLGPIHPPPRTSMTEEYRVPDGMVGLIIGRGGEQINKIQQDSGCKVQI
SPDSGGLPERSVSLTGAPESVQKAKMMLDDIVSRGRGGPPGQFHDNANGGQNGTVQEIMI
PAGKAGLVIGKGGETIKQLQERAGVKMILIQDGSQNTNVDKPLRIIGDPYKVQQACEMVM
DILRERDQGGFGSRNEYGSRIGGGIDVPVPRHSVGVVIGRSGEMIKKIQNDAGVRIQFKQ
DDGTGPEKIAHIMGPPDRCEHAARIINDLLQSLRSGPPGPPGGPGMPPGGRGRGRGQGNW
GPPGGEMTFSIPTHKCGLVIGRGGENVKAINQQTGAFVEISRQLPPNGDPNFKLFIIRGS
PQQIDHAKQLIEEKIEGPLCPVGPGPGGPGPAGPMGPFNPGPFNQGPPGAPPHAGGPPPH
QYPPQGWGNTYPQWQPPAPHDPSKAAAAAADPNAAWAAYYSHYYQQPPGPVPGPAPAPAA
PPAQGEPPQPPPTGQSDYTKAWEEYYKKIGQQPQQPGAPPQQDYTKAWEEYYKKQAQVAT
GGGPGAPPGSQPDYSAAWAEYYRQQAAYYGQTPGPGGPQPPPTQQGQQQAQ

Profilin 1(PFN1) (e.g., GenBank Accession
Number NP_005013 (SEQ ID NO: 127):
>refseqp|NP_005013|NP_005013 profilin 1 [Homo sapiens].
MAGWNAYIDNLMADGTCQDAAIVGYKDSPSVWAAVPGKTFVNITPAEVGVLVGKDRSSFY
VNGLTLGGQKCSVIRDSLLQDGEFSMDLRTKSTGGAPTFNVTVTKTDKTLVLLMGKEGVH
GGLINKKCYEMASHLRRSQY

Chloride intracellular Channel Protein 1, CLIC1
(e.g., GenBank Accession Number NP_001279
(SEQ ID NO: 128):
>refseqp|NP_001279|NP_001279 chloride
intracellular channel 1 [Homo sapiens].
MAEEQPQVELFVKAGSDGAKIGNCPFSQRLFMVLWLKGVTFNVTTVDTK
RRTETVQKLCPGGQLPFLLYGTEVHTDTNKIEEFLEAVLCPPRYPKLAA
LNPESNTAGLDIFAKFSAYIKNSNPALNDNLEKGLLKALKVLDNYLTSP
LPEEVDETSAEDEGVSQRKFLDGNELTLADCNLLPKLHIVQVVCKKYRG
FTIPEAFRGVHRYLSNAYAREEFASTCPDDEEIELAYEQVAKALK

Zinc Finger Protein 831
(e.g., GenBank Accession Number NP_848552
(SEQ ID NO: 129):
>refseqp|NP_848552|NP_848552 zinc finger
protein 831 [Homo sapiens].
MEVPEPTCPAPPARDQPAPTPGPPGAPGGQASPHLTLGPVLLPPEQGLA
PPTVFLKALPIPLYHTVPPGGLQPRAPLVTGSLDGGNVPFILSPVLQPE
GPGPTQVGKPAAPTLTVNIVGTLPVLSPGLGPTLGSPGKVRNAGKYLCP
HCGRDCLKPSVLEKHIRSHTGERPFPCATCGIAFKTQSNLYKHRRTQTH
LNNSRLSSESEGAGGGLLEEGDKAGEPPRPEGRGESRCQGMHEGASERP
LSPGAHVPLLAKNLDVRTEAAPCPGSAFADREAPWDSAPMASPGLPAAS
TQPWRKLPEQKSPTAGKPCALQRQQATAAEKPWDAKAPEGRLRKCESTD
SGYLSRSDSAEQPHAPCSPLHSLSEHSAESEGEGGPGPGPGVAGAEPGA
REAGLELEKKRLEERIAQLISINQAVVDDAQLDNVRPRKTGLSKQGSID
LPTPYTYKDSFHFDIRALEPGRRRAPGPVRSTWTPPDKSRPLFFHSVPT
QLSTTVECVPVTRSNSLPFVEGSRTWLEPREPRDPWSRTQKPLSPRPGP
ARLGCRSGLSSTDVPSGHPRALVRQAAVEDLPGTPIGDALVPAEDTDAK
RTAAREAMAGKGRAGGRKCGQRRLKMFSQEKWQVYGDETFKRIYQKMKA
SPHGGKKAREVGMGSGAELGFPLQKEAAGSSGTVPTQDRRTPVHEDISA
GATPEPWGNPPALEASLVTEPTKHGETVARRGDSDRPRVEEAVSSPALG
GRDSPCSGSRSPLVSPNGRLELGWQMPPAPGPLKGGDVEAPRPVWPDPK
LEGGARGVGDVQETCLWAQTVLRWPSRGSGEDKLPSERKKLKVEDLHSW
KQPEPVSAETPGGPTQPASLSSQKQDADPGEVPGGSKESARQVGEPLES
SGASLAAASVALKRVGPRDKATPLHPAAPAPAEHPSLATPPQAPRVLSA
LADNAFSPKYLLRLPQAETPLPLPIPWGPRHSQDSLCSSGWPEERASFV
GSGLGTPLSPSPASGPSPGEADSILEDPSCSRPQDGRKGAQLGGDKGDR
MATSRPAARELPISAPGAPREATSSPPTPTCEAHLVQDMEGDSHRIHRL
CMGSTLARARLSGDVLNPWVPNWELGEPPGNAPEDPSSGPLVGPDPCSP
LQPGSFLTALTRPQGVPPGWPELALSSHSGTSRSHSTRSPHSTQNPFPS
LKAEPRLTWCCLSRSVPLPAEQKAKAASVYLAVHFPGSSLRDEGPNGPP
GSNGGWTWTSPGEGGPAQMSKFSYPTVPGVMPQHQVSEPEWKKGLPWRA
KMSRGNSKQRKLKINPKRYKGNFLQSCVQLRASRLRTPTWVRRRSRHPP
ALEGLKPCRTPGQTSSEIAGLNLQEEPSCATSESPPCCGKEEKKEGDCR
QTLGTLSLGTSSRIVREMDKRTVKDISPSAGEHGDCTTHSTAATSGLSL
QSDTCLAVVNDVPLPPGKGLDLGLLETQLLASQDSVSTDPKPYIFSDAQ
RPSSFGSKGTFPHHDIATSVAAVCISLPVRTDHIAQEIHSAESRDHSQT
AGRTLTSSSPDSKVTEEGRAQTLLPGRPSSGQRISDSVPLESTEKTHLE
IPASGPSSASSHHKEGRHKTFFPSRGQYGCGEMTVPCPSLGSDGRKRQV
SGLITRKDSVVPSKPEQPIEIPEAPSKSLKKRSLEGMRKQTRVEFSDTS
SDDEDRLVIEI

Endoplasmin (e.g., GenBank Accession Number
NP_003290 (SEQ ID NO: 130):
>refseqp|NP_003290|NP_003290 heat shock protein
90 kDa beta, member 1 [Homo sapiens].
MRALWVLGLCCVLLTFGSVRADDEVDVDGTVEEDLGKSREGSRTDDEVV
QREEEAIQLDGLNASQIRELREKSEKFAFQAEVNRMMKLIINSLYKNKE
IFLRELISNASDALDKIRLISLTDENALSGNEELTVKIKCDKEKNLLHV
TDTGVGMTREELVKNLGTIAKSGTSEFLNKMTEAQEDGQSTSELIGQFG
VGFYSAFLVADKVIVTSKHNNDTQHIWESDSNEFSVIADPRGNTLGRGT
TITLVLKEEASDYLELDTIKNLVKKYSQFINFPIYVWSSKTETVEEPME
EEEAAKEEKEESDDEAAVEEEEEEKKPKTKKVEKTVWDWELMNDIKPIW
QRPSKEVEEDEYKAFYKSFSKESDDPMAYIHFTAEGEVTFKSILFVPTS
APRGLFDEYGSKKSDYIKLYVRRVFITDDFHDMMPKYLNFVKGVVDSDD
LPLMVSRETLQQHKLLKVIRKKLVRKTLDMIKKIADDKYNDTFWKEFGT
NIKLGVIEDHSNRTRLAKLLRFQSSHHPTDITSLDQYVERMKEKQDKIY
FMAGSSRKEAESSPFVERLLKKGYEVIYLTEPVDEYCIQALPEFDGKRF
QNVAKEGVKFDESEKTKESREAVEKEFEPLLNWMKDKALKDKIEKAVVS
QRLTESPCALVASQYGWSGNMERIMKAQAYQTGKDISTNYYASQKKTFE
INPRHPLIRDMLRRIKEDEDDKTVLDLAVVLFETATLRSGYLLPDTKAY
GDRIERMLRLSLNIDPDAKVEEEPEEEPEETAEDTTEDTEQDEDEEMDV
GTDEEEETAKESTAEKDEL

Ribosomal Protein S10 (RPS10)
(e.g., GenBank Accession Number P46783
(SEQ ID NO: 131):
>uniprot|P46783|RS10_HUMAN 40S ribosomal
protein S10;
MLMPKKNRIAIYELLFKEGVMVAKKDVHMPKHPELADKNVPNLHVMKAM
QSLKSRGYVKEQFAWRHFYWYLTNEGIQYLRDYLHLPPEIVPATLRRSR
PETGRPRPKGLEGERPARLTRGEADRDTYRRSAVPPGADKKAEAGAGSA
TEFQFRGGFGRGRGQPPQ

Splicing Factor, Arginine/Serine-Rich 3
(e.g., GenBank Accession Number NP_003008
(SEQ ID NO: 132):
>refseqp|NP_003008|NP_003008 splicing factor,
arginine/serine-rich 3 [Homo sapiens].
MHRDSCPLDCKVYVGNLGNNGNKTELERAFGYYGPLRSVWVARNPPGFA
FVEFEDPRDAADAVRELDGRTLCGCRVRVELSNGEKRSRNRGPPPSWGR
RPRDDYRRRSPPPRRRSPRRRSFSRSRSRSLSRDRRRERSLSRERNHKP
SRSFSRSRSRSRSNERK

ACTA2 Protein ( alpha actin, smooth muscle)
(e.g., GenBank Accession Number P62736
(SEQ ID NO: 133):
>uniprot|P62736|ACTA_HUMAN Actin, aortic smooth
muscle;
MCEEEDSTALVCDNGSGLCKAGFAGDDAPRAVFPSIVGRPRHQGVMVGM
GQKDSYVGDEAQSKRGILTLKYPIEHGIITNWDDMEKIWHHSFYNELRV
APEEHPTLLTEAPLNPKANREKMTQIMFETFNVPAMYVAIQAVLSLYAS
GRTTGIVLDSGDGVTHNVPIYEGYALPHAIMRLDLAGRDLTDYLMKILT
ERGYSFVTTAEREIVRDIKEKLCYVALDFENEMATAASSSSLEKSYELP
DGQVITIGNERFRCPETLFQPSFIGMESAGIHETTYNSIMKCDIDIRKD
LYANNVLSGGTTMYPGIADRMQKEITALAPSTMKIKIIAPPERKYSVWI
GGSILASLSTFQQMWISKQEYDEAGPSIVHRKCF

Isoform 1 Of Sodium Channel Protein Type 8
Subunit Alpha, SCN8A (e.g., GenBank Accession
Number NP_055006 SEQ ID NO: 134):
>refseqp|NP_2355006|NP_055006 sodium channel,
voltage gated, type VIII, alpha [Homo sapiens].
MAARLLAPPGPDSFKPFTPESLANIERRIAESKLKKPPKADGSHREDDE
DSKPKPNSDLEAGKSLPFIYGDIPQGLVAVPLEDFDPYYLTQKTFVVLN
RGKTLFRFSATPALYILSPFNLIRRIAIKILIHSVFSMIIMCTILTNCV
FMTFSNPPDWSKNVEYTFTGIYTFESLVKIIARGFCIDGFTFLRDPWNW
LDFSVIMMAYITEFVNLGNVSALRTFRVLRALKTISVIPGLKTIVGALI
QSVKKLSDVMILTVFCLSVFALIGLQLFMGNLRNKCVVWPINFNESYLE
NGTKGFDWEEYINNKTNFYTVPGMLEPLLCGNSSDAGQCPEGYQCMKAG
RNPNYGYTSFDTFSWAFLALFRLMTQDYWENLYQLTLRAAGKTYMIFFV
LVIFVGSFYLVNLILAVVAMAYEEQNQATLEEAEQKEAEFKAMLEQLKK
QQEEAQAAAMATSAGTVSEDAIEEEGEEGGGSPRSSSEISKLSSKSAKE
RRNRRKKRKQKELSEGEEKGDPEKVFKSESEDGMRRKAFRLPDNRIGRK
FSIMNQSLLSIPGSPFLSRHNSKSSIFSFRGPGRFRDPGSENEFADDEH
STVEESEGRRDSLFIPIRARERRSSYSGYSGYSQGSRSSRIFPSLRRSV
KRNSTVDCNGVVSLIGGPGSHIGGRLLPEATTEVEIKKKGPGSLLVSMD
QLASYGRKDRINSIMSVVTNTLVEELEESQRKCPPCWYKFANTFLIWEC
HPYWIKLKEIVNLIVMDPFVDLAITICIVLNTLFMAMEHHPMTPQFEHV
LAVGNLVFTGIFTAEMFLKLIAMDPYYYFQEGWNIFDGFIVSLSLMELS
LADVEGLSVLRSFRLLRVFKLAKSWPTLNMLIKIIGNSVGALGNLTLVL
AIIVFIFAVVGMQLFGKSYKECVCKINQDCELPRWHMHDFFHSFLIVFR
VLCGEWIETMWDCMEVAGQAMCLIVFMMVMVIGNLVVLNLFLALLLSSF
SADNLAATDDDGEMNNLQISVIRIKKGVAWTKLKVHAFMQAHFKQREAD
EVKPLDELYEKKANCIANHTGADIHRNGDFQKNGNGTTSGIGSSVEKYI
IDEDHMSFINNPNLTVRVPIAVGESDFENLNTEDVSSESDPEGSKDKLD
DTSSSEGSTIDIKPEVEEVPVEQPEEYLDPDACFTEGCVQRFKCCQVNI
EEGLGKSWWILRKTCFLIVEHNWFETFIIFMILLSSGALAFEDIYIEQR
KTIRTILEYADKVFTYIFILEMLLKWTAYGFVKFFTNAWCWLDFLIVAV
SLVSLIANALGYSELGAIKSLRTLRALRPLRALSRFEGMRVVVNALVGA
IPSIMNVLLVCLIFWLIFSIMGVNLFAGKYHYCFNETSEIRFEIEDVNN
KTECEKLMEGNNTEIRWKNVKINFDNVGAGYLALLQVATFKGWMDIMYA
AVDSRKPDEQPKYEDNIYMYIYFVIFIIFGSFFTLNLFIGVIIDNFNQQ
KKKFGGQDIFMTEEQKKYYNAMKKLGSKKPQKPIPRPLNKIQGIVFDFV
TQQAFDIVIMMLICLNMVTMMVETDTQSKQMENILYWINLVFVIFFTCE
CVLKMFALRHYYFTIGWNIFDFVVVILSIVGMFLADIIEKYFVSPTLFR
VIRLARIGRILRLIKGAKGIRTLLFALMMSLPALFNIGLLLFLVMFIFS
IFGMSNFAYVKHEAGIDDMFNFETFGNSMICLFQITTSAGWDGLLLPIL
NRPPDCSLDKEHPGSGFKGDCGNPSVGIFFFVSYIIISFLIVVNMYIAI
ILENFSVATEESADPLSEDDFETFYEIWEKFDPDATQFIEYCKLADFAD
ALEHPLRVPKPNTIELIAMDLPMVSGDRIHCLDILFAFTKRVLGDSGEL
DILRQQMEERFVASNPSKVSYEPITTTLRRKQEEVSAVVLQRAYRGHLA
RRGFICKKTTSNKLENGGTHREKKESTPSTASLPSYDSVTKPEKEKQQR
AEEGRRERAKRQKEVRESKC

Isoform Long Of Galectin-9 (e.g., GenBank
Accession Number NP_033665 SEQ ID NO: 135):
>refseqp|NP_033665|NP_033665 galectin-9
isoform long [Homo sapiens].
MAFSGSQAPYLSPAVPFSGTIQGGLQDGLQITVNGTVLSSSGTRFAVNF
QTGFSGNDIAFHFNPRIEDGGYVVCNTRQNGSWGPEERKTHMPFQKGMP
FDLCFLVQSSDFKVMVNGILFVQYFHRVPFHRVDTISVNGSVQLSYISF
QNPRTVPVQPAFSTVPFSQPVCFPPRPRGRRQKPPGVWPANPAPITQTV
IHTVQSAFGQMFSTPAIPPMMYTHPAYPMPFITTILGGLYPSKSILLSG
TVLPSAQRFHINLCSGNHIAFHLNPRFDENAVVRNTQIDNSWGSEERSL
PRKMPFVRGQSFSVWILCEAHCLKVAVDGQHLFEYYHRLRNLPTINRLE
VGGDIQLTHVQT

T-Complex Protein 1 Subunit Epsilon, CCT5
(e.g., GenBank Accession Number NP_036205
(SEQ ID NO: 136):
>refseqp|NP_036205|NP_036205 chaperonin
containing TCP1, subunit 5 (epsilon)
[Homo sapiens].
MASMGTLAFDEYGRPFLIIKDQDRKSRLMGLEALKSHIMAAKAVANTMR
TSLGPNGLDKMMVDKDGDVTVTNDGATILSMMDVDHQIAKLMVELSKSQ
DDEIGDGTTGVVVLAGALLEEAEQLLDRGIHPIRIADGYEQAARVAIEH
LDKISDSVLVDIKDTEPLIQTAKTTLGSKVVNSCHRQMAEIAVNAVLTV
ADMERRDVDFELIKVEGKVGGRLEDTKLIKGVIVDKDFSHPQMPKKVED
YAKIAILTCPFEPPKPKTKHKLDVTSVEDKALQKYEKEKFEEMIQQIKE
TGANLAICQWGFDDEANHLLLQNNLPAVRWVGGPEIELIAIATGGRIVP
RFSELTAEKLGFAGINQEISFGTTKDKMLVIEQCKNSRAVTIFIRGGNK
MIIEEAKRSLHDALCVIRNLIRDNRVVYGGGAAEISCALAVSQEADKCP
TLEQYAMRAFADALEVIPMALSENSGMNPIQTMTEVRARQVKEMNPALG
IDCLHKGTNDMKQQHVIETLIGKKQQISLATQMVRMILKIDDIRKPGES
EE

Alpha-Enolase, Lung Specific
(e.g., GenBank Accession Number CALA47179
(SEQ ID NO: 137):
[sequence omitted]

Proto-Oncogene Serine/Threonine-Protein Kinase
MOS (e.g., GenBank Accession Number NP_005363
(SEQ ID NO: 138):
>refseqp|NP_005363|NP_005363 v-mos Moloney murine
sarcoma viral oncogene homolog [Homo sapiens]
MPSPLALRPYLRSEFSPSVDARPCSSPSELPAKLLLGATLPRAPRLPRR
LAWCSIDWEQVCLLQRLGAGGFGSVYKATYRGVPVAIKQVNKCTKNRLA
SRRSFWAELNVARLRHDNIVRVVAASTRTPAGSNSLGTIIMEFGGNVTL
HQVIYGAAGHPEGDAGEPHCRTGGQLSLGKCLKYSLDVVNGLLFLHSQS
IVHLDLKPANILISEQDVCKISDFGCSEKLEDLLCFQTPSYPLGGTYTH
RAPELLKGEGVTPKADIYSFAITLWQMTTKQAPYSGERQHILYAVVAYD
LRPSLSAAVFEDSLPGQRLGDVIQRCWRPSAAQRPSARLLLVDLTSLKA
ELG

Isoform 1 Of Beta-Adducin (ADD2)
(e.g., GenBank Accession Number NP_001608
(SEQ ID NO: 139):
>refseqp|NP_001608|NP_001608 adducin 2 isoform a
[Homo sapiens].
MSEETVPEAASPPPPQGQPYFDRFSEDDPEYMRLRNRAADLRQDFNLME
PQKKRVTMILQSSFREELEGLIQEQMKKGNNSSNIWALRQIADFMASTS
HAVFPTSSMNVSMMTPINDLHTADSLNLAKGERLMRCKISSVYRLLDLY
GWAQLSDTYVTLRVSKEQDHFLISPKGVSCSEVTASSLIKVNILGEVVE
KGSSCFPVDTTGFCLHSAIYAARPDVRCIIHLHTPATAAVSAMKWGLLP
VSHNALLVGDMAYYDFNGEMEQEADRINLQKCLGPTCKILVLRNHGVVA
LGDTVEEAFYKIFHLQAACEDQVSALSSAGGVENLILLEQEKHRPHEVG
SVQWAGSTFGPMQKSRLGEHEFEALMRMLDNLGYRTGYTYRHPFVQEKT
KHKSEVEIPATVTAFVFEEDGAPVPALRQHAQKQQKEKTRWLNTPNTYL
RVNVADEVQRSMGSPRPKTTWMKADEVEKSSSGMPIRIENPNQFVPLYT
DPQEVLEMRNKIREQNRQDVKSAGPQSQLLASVIAEKSRSPSTESQLMS
KGDEDTKDDSEETVPNPFSQLTDQELEEYKKEVERKKLELDGEKETAPE
EPGSPAKSAPASPVQSPAKEAETKSPLVSPSKSLEEGTKETETSKAATT
EPETTQPEGVVVNGREEEQTAEEILSKGLSQMTTSADTDVDTSKDKTES
VTSGPMSPEGSPSKSPSKKKKKFRTPSFLKKSKKKEKVES

Apolipoprotein E (APOE) (e.g., GenBank Accession
Number NP_000032 SEQ ID NO : 140):
>refseqp|NP_00032|NP_000032 apolipoprotein E
precursor [Homo sapiens].
[sequence omitted]

Ubiquilin-4 (UBQLN4)
(ataxin-1 ubiquitin-like interacting protein)
(e.g. , GenBank Accession Number NP_064516
(SEQ ID NO: 41):
>refseqp|NP_064516|NP_064516 ataxin-1 ubiquitin-
like interacting protein [Homo sapiens].
MAEPSGAETRPPIRVTVKTPKDKEEIVICDRASVKEFKEETSRRFKAQQ
DQLVLIFAGKILKDGDTLNQHGIKDGLTVHLVIKTPQKAQDPAAATASS
PSTPDPASAPSTTPASPATPAQPSTSGSASSDAGSGSRRSSGGGPSPGA
GEGSPSATASILSGFGGILGLGSLGLGSANFMELQQQMQRQLMSNPEML
SQIMENPLVQDMMSNPDLMRHMIMANPQMQQLMERNPEISHMLNNPELM
RQTMELARNPAMMQEMMRNQDRALSNLESIPGGYNALRRMYTDIQEPMF
SAAREQFGNMPFSSLAGNSDSSSSOPLRTENREPLPNPWSPSPPTSQAP
GSGGEGTGGSGTSQVHPTVSNPFGINAASLGSGMFNSPEMQALLQQISE
NPQLMQNVISAPYMRSMMQTLAQNPDFAAQMMVNVPLFAGNPQLQEQLR
LQLPVFLQQMQNPESLSILTNPRAMQALLQIQQGLQTLQTEAPGLVPSL
GSFGISRTPAPSAGSNAGSTPEAPTSSPATPATSSPTGASSAQQQLMQQ
MIQLLAGSGNSQVQTPEVRFQQQLEQLNSMGFINREANLQALIATGGDI
NAAIERLLGSQLS

Sumo-Conjugating Enzyme UB21
(URC9 homolog in yeast)
(e.g., GenBank Accession Number NP_003336
(SEQ ID NO: 142):
>refseqp|NP_003336|NP_003336 ubiquitin-
conjugating enzyme E2I [Homo sapiens].
MSGIALSRLAQERKAWRKDHPFGFVAVPTKNPDGTMNLMNWECAIPGKK
GTPWEGGLFKLRLMLFKDDYPSSPPKCKFEPPLFHPNVYPSGTVCLSIL
EEDKDWRPAITIKQILLGIQELLNEPNIQDPAQAEAYTIYCQNRVEYEK
RVRAQAKKFAPS

Myosin-15(MYH15) (e.g., GenBank Accession Number NP_055796
(SEQ ID NO: 143):
>refseqp|NP_055796|NP_055796 myosin, heavy polypeptide 15
[Homo sapiens].
MVESCLLTFRAFFWWIALIKMDLSDLGEAAAFLRRSEAELLLLQATALDGKKKCWIPDGE
NAYIEAEVKGSEDDGTVIVETADGESLSIKEDKIQQMNPPEFEMIEDMAMLTHLNEASVL
HTLKRRYGQWMIYTYSGLFCVTINPYKWLPVYQKEVMAAYKGKRRSEAPPHIFAVANNAF
QDMLHNRENQSILFTGESGAGKTVNSKHIIQYFATIAAMIESRKKQGALEDQIMQANTIL
EAFGNAKTLRNDNSSRFGKFIRMHFGARGMLSSVDIDIYLLEKSRVIFQQAGERNYHIFY
QILSGQKELHDLLLVSANPSDFHFCSCGAVTVESLDDAEELLATEQAMDILGFLPDEKYG
CYKLTGAIMHFGNMKFKQKPREEQLEADGTENADKAAFLMGINSSELVKCLIHPRIKVGN
EYVTRGQTIEQVTCAVGALSKSMYERMFKWLVARINRALDAKLSRQFFIGILDITGFEIL
EYNSLEQLCINFTNEKLQQFFNWHMFVLEQEEYKKESIEWVSIGFGLDLQACIDLIEKPM
GILSILEEECMFPKATDLTFKTKLFDNHFGKSVHLQKPKPDKKKFEAHFELVHYAGVVPY
NISGWLEKNKDLLNETVVAVFQKSSNRLLASLFENYMSTDSAIPFGEKKRKKGASFQTVA
SLHKENLNKLMTNLKSTAPHFVRCINPNVNKIPGILDPYLVLQQLRCNGVLEGTRICREG
FPNRLQYADFKQRYCILNPRTFPKSKFVSSRKAAEELLGSLEIDHTQYRFGITKVFFKAG
FLGQLEAIRDERLSKVFTLFQARAQGKLMRIKFQKILEERDALILIQWNIRAFMAVKNWP
WMRLFFKIKPLVKSSEVGEEVAGLKEECAQLQKALEKSEFQREELKAKQVSLTQEKNDLI
LQLQAEQETLANVEEQCEWLIKSKIQLEARVKELSERVEEEEEINSELTARGRKLEDECF
ELKKEIDDLETMLVKSEKEKRTTEHKVENLTEEVEFLNEDISKLNRAAEVVQEAHQQTLD
DLHMEEEKLSSLSKANLKLEQQVDELEGALEQERKARMNCERELHKLEGNLKLNRESMEN
LESSQRHLAEELRKKELELSQMNSKVENEKGLVAQLQKTVKELOTQIKDLKEKLEAERTT
RAKMERERADLTQDLADLNERLEEVGGSSLAQLEITKKQETKFQKLHRDMEEATLHFETT
SASLKKRHADSLAELEGQVENLQQVKQKLEKDKSDLQLEVDDLLTRVEQMTRAKANAEKL
CTLYEERLHEATAKLDKVTQLANDLAAQKTKLWSESGEFLRRLEEKEALINQLSREKSNF
TRQIEDLRGQLEKETKSQSALAHALQKAQRDCDLLREQYEEEQEVKAELHRTLSKVNAEM
VQWRMKYENNVIQRTEDLEDAKKELAIRLQEAAEAMGVANARNASLERARHQLQLELGDA
LSDLGKVRSAAARLDQKQLQSGKALADWKQKHEESQALLDASOKEVQALSTELLKLKNTY
EESIVGQETLRRENKNLQEEISNLTNQVREGTKNLTEMEKVKKLIEEEKTEVQVTLEETE
GALERNESKILHFQLELLEAKAELERKLSEKDEEIENFRRKQQCTIDSLQSSLDSEAKSR
IEVTRLKKKMEEDLNEMELQLSCANRQVSEATKSLGQLQIQIKDLQMQLDDSTQLNSDLK
EQVAVAERRNSLLQSELEDLRSLQEQTERGRRLSEEELLEATERINLFYTQNTSLLSQKK
KLEADVARMQKEAEEVVQECQNAEEKAKKAAIEAANLSEELKKKQDTIAHLERTRENMEQ
TITDLQKRLAEAEQMALMGSRKQIQKLESRVRELEGELEGEIRRSAEAQRGARRLERCIK
ELTYQAEEDKKNLSRMQTQMDKLQLKVQNYKQQVEVAETQANQYLSKYKKQQHELNEVKE
RAEVAESQVNKLKIKAREFGKKVQEE

FLJ93091, Homo Sapiens UMP-CMP Kinase (UMP-CMPK)
(e.g. , GenBank Accession Number NP_057392 (SEQ ID NO: 144):
refseqp|NP_057392|NP_057392 UMP-CMP kinase 1 isoform a
[Homo sapiens].
MLSRCRSGLLHVLGLSFLLQTRRPILLCSPRLMKPLVVFVLGGPGAGKGTQCARIVEKYG
YTHLSAGELLRDERKNPDSQYGELIEKYIKEGKIVPVEITISLLKREMDQTMAANAQKNK
FLIDGFPRNQDNLQGWNKTMDGKADVSFVLFFDCNNEICIERCLERGKSSGRSDDNRESL
EKRIQTYLQSTKPIIDLYEEMGKVKKIDASKSVDEVFDEVVQIFKEG

Intelectin-1 (ITLN1) (e.g., GenBank Accession
Number NP_060095 (SEQ ID NO: 145):
>refseqp|NP_060095|NP_060095 intelectin [Homo sapiens].
MNQLSFLLFLIATTRGWSTDEANTYFKEWTCSSSPSLPRSCKEIKDECPSAFDGLYFLRT
ENGVIYQTFCDMTSGGGGWTLVASVHENDMRGKCTVGDRWSSQQGSKAVYPEGDGNWANY
NTFGSAEAATSDDYKNPGYYDIQAKDLGIWHVPNKSPMQHWRNSSLLRYRTDTGFLQTLG
HNLFGIYQKYPVKYGEGKCWTDNGPVIPVVYDFGDAQKTASYYSPYGQREFTAGFVQFRV
FNNERAANALCAGMRVTGCNTEHHCIGGGGYFPEASPQQCGDFSGFDWSGYGTHVGYSSS
REITEAAVLLFYR

Apolipoprotein A-IV (APOA4) (e.g., GenBank Accession
Number Q13784 (SEQ ID NO: 146):
>uniprot|Q13784|Q13784_HUMAN APOA4 protein;
LEPYADQLRTQVNTQAEQLRRQLDPLAQRMERVLRENADSLQASLRPHADELKAKIDQNV
EELKGRLTPYADEFKVKIDQTVEELRRSLAPYAQDTQEKLNHQLEGLTPQMKKNAEELKA
RISASAEELRQRLAPLAEDVRGNLKGNTEGLQKSLAELGGHLDQQVEEFRRRVEPYGENF
NKALVQQMEQLRQKLGPHAGDVEGHLSFLEKDLRDKVNSFFSTFKEKESQDKTLSLPELE
QQQE

Mitochondrial pyruvate dehydrogenase (lipoamide) alpha 1 (PDHA1)
(e.g., GenBank Accession Number P0559 (SEQ ID NO: 147):
>uniprot|P08559|ODPA_HUMAN Pyruvate dehydrogenase E1 component
subunit alpha, somatic form, mitochondrial;
MRKMLAAVSRVLSGASQKPASRVLVASRNFANDATFEIKKCDLHRLEEGPPVTTVLTRED
GLKYYRMMQTVRRMELKADQLYKQKIIRGFCHLCDGQEACCVGLEAGINPTDHLITAYRA
HGFTFTRGLSVREILAELTGRKGGCAKGKGGSMHMYAKNFYGGNGIVGAQVPLGAGIALA
CKYNGKDEVCLTLYGDGAANQGQIFEAYNMAALWKLPCIFICENNRYGMGTSVERAAAST
DYYKRGDFIPGLRVDGMDILCVREATRFAAAYCRSGKGPILMELQTYRYHGHSMSDPGVS
YRTREEIQEVRSKSDPIMLLKDRMVNSNLASVEELKEIDVEVRKEIEDAAQFATADPEPP
LEELGYHIYSSDPPFEVRGANQWIKFKSVS

Leucine-Rich Repeat-Containing Protein 59 (LRRC59)
(e.g., GenBank Accession Number NP_060979 (SEQ ID NO: 148):
>refseqp|NP_060979|NP_060979 leucine rich repeat containing 59
[Homo sapiens]
MTKAGSKGGNLRDKLDGNELDLSLSDLNEVPVKELAALPKATILDLSCNKLTTLPSDFCG
LTHLVKLDLSKNKLQQLPADFGRLVNLQHLDLLNNKLVTLPVSFAQLKNLKWLDLKDNPL
DPVLAKVAGDCLDEKQCKQCANKVLQHMKAVQADQERERQRRLEVEREAEKKREAKQRAK
EAQERELRKREKAEEKERRRKEYDALKAAKREQEKKPKKEANQAPKSKSGSRPREPPPRK
HTRSWAVLKLLLLLLLFGVAGGLVACRVTELQQQPLCTSVNTIYDNAVQGLRRHEILQWV
LQTDSQQ

60S Ribosomal Protein L37A. (RPL37A)
(e.g., GenBank Accession Number NP_000989 (SEQ ID NO: 149):
>refseqp|NP_000989|NP_000989 ribosomal protein L37a
[Homo sapiens].
MAKRTKKVGIVGKYGTRYGASTRKMVKKIEISQHAKYTCSFCGKTKMKRRAVGIWHCGSC
MKTVAGGAWTYNTTSAVTVKSAIRRLKELKDQ

Uridine-Cytidine Kinase 1-like 1 (UCKL1).
(e.g., GenBank Accession Number Q53HM1 (SEQ ID NO: 150):
>uniprot|Q53HM1|Q53HM1_HUMAN Uridine kinase;
MAAPPARADADPSPTSPPTARDTPGRQAEKSETACEDRSNAESLDRLLPPVGTGRSPRKR
TTSQCKSEPPLLRTSKRTIYTAGRPPWYNEHGTQSKEAFAIGLGGGSASGKTTVARMIIE
ALDVPWVVLLSMDSFYKVLTEQQQEQAAHNNFNFDHPDAFDFDLIIFTLKKLKQGKSVKV
PIYDFTTHSRKKDWKTLYGANVIIFEGIMAFADKTLLELLDMKIFVDTDSDIRLVRRLRR
DISERGRDIEGVIKQYNKFVKPSFDQYIQPTMRLADIVVPRGSGNTVAIDLIVQHVHSQL
EERELSVRAALASAHQCHPLPRTLSVLKSTPQVRGMHTIIRDKETSRDEFIFYSKRLMRL
LIEHALSFLPFQDCVVQTPQGQDYAGKCYAGKQITGVSILRAGETMEPALRAVCKDVRIG
TILIQTNQLTGEPELHYLRLPKDISDDHVILMDCTVSTGAAAMMAVRVLLDHDVPEDKIF
LLSLLMAEMGVHSVAYAFPRVRIITTAVDKRVNDLFRIIPGIGNFGDRYFGTDAVPDGSD
EEEVAYTG

Aldehyde Dehydrogenase 9A1 (ALDH9A1)
(e.g., GenBank Accession Number NP_00687 (SEQ ID NO: 151):
>refseqp|NP_000687|NP_000687 aldehyde dehydrogenase 9A1
[homo sapiens].
MFLRAGLAALSPLLRSLRPSPVAAMSTGTFVVSQPLNYRGGARVEPADASGTEKAFEPAT
GRVIATFTCSGEKEVNLAVQNAKAAFKIWSQKSGMERCRILLEAARIIREREDEIATMEC
INNGKSIFEARLDIDISWQCLEYYAGLAASMAGEHIQLPGGSFGYTRREPLGVCVGIGAW
NYPFQIASWKSAPALACGNAMVFKPSPFTPVSALLLAEIYSEAGVPPGLFNVVQGGAATG
QFLCQHPDVAKVSFTGSVPTGMKIMEMSAKGIKPVTLELGGKSPLIIFSDCDMNNAVKGA
LMANFLTQGQVCCNGTRVFVQKEILDKFTEEVVKQTQRIKIGDPLLEDTRMGPLINRPHL
ERVLGFVKVAKEQGAKVLCGGDIYVPEDPKLKDGYYMRPCVLTNCRDDMTCVKEEIFGPV
MSILSFDTEAEVLERANDTTFGLAAGVFTRDIQRAHRVVAELQAGTCFINNYNVSPVELP
FGGYKKSGFGRENGRVTIEYYSQLKTVCVEMGDVESAF

Isoform 3 Of Thioredoxin Reductase 1, Cytoplasmic (TXNRD1)
(e.g., GenBank Accession Number Q16881 (SEQ ID NO: 152):
>uniprot|Q16881|TRXR1_HUMAN Thioredoxin reductase 1, cytoplasmic;
MGCAEGKAVAAAAPTELQTKGKNGDGRRRSAKDHHPGKTLPENPAGFTSTATADSRALLQ
AYIDGHSVVIFSRSTCTRCTEVKKLFKSLCVPYFVLELDQTEDGRALEGTLSELAAETDL
PVVFVKQRKIGGHGPTLKAYQEGRLQKLLKMNGPEDLPKSYDYDLIIIGGGSGGLAAAKE
AAQYGKKVMVLDFVTPTPLGTRWGLGGTCVNVGCIPKKLMHQAALLGQALQDSRNYGWKV
EETVKHDWDRMIEAVQNHIGSLNWGYRVALREKKVVYENAYGQFIGPHRIKATNNKGKEK
IYSAERFLIATGERPRYLGIPGDKEYCISSDDLFSLPYCPGKTLVVGASYVALECAGFLA
GIGLDVTVMVRSILLRGFDQDMANKIGEHMEEHGIKFIRQFVPIKVEQIEAGTPGRLRVV
AQSTNSEEIIEGEYNTVMLAIGRDACTRKIGLETVGVKINEKTGKIPVTDEEQTNVPYIY
AIGDILEDKVELTPVAIQAGRLLAQRLYAGSTVKCDYENVPTTVFTPLEYGACGLSEEKA
VEKFGEENIEVYHSYFWPLEWTIPSRDNNKCYAKIICNTKDNERVVGFHVLGPNAGEVTQ
GFAAALKCGLTKKQLDSTIGIHPVCAEVFTTLSVTKRSGASILQAGCUG

Nuclear Receptor Subfamily 2 Group E Member 1(NR2E1)
(e.g. , GenBank Accession Number NP_003260 (SEQ ID NO: 153):
>refseqp|NP_003260|NP_003260 nuclear receptor subfamily 2,
group E,member 1 [Homo sapiens].
MSKPAGSTSRILDIPCKVCGDRSSGKHYGVYACDGCSGFFKRSIRRNRTYVCKSGNQGGC
PVDKTHRNQCRACRLKKCLEVNMNKDAVQHERGPRTSTIRKQVALYFRGHKEENGAAAHF
PSAALPAPAFFTAVTQLEPHGLELAAVSTTPERQTLVSLAQPTPKYPHEVNGTPMYLYEV
ATESVCESAARLLFMSIKWAKSVPAFSTLSLQDQLMLLEDAWRELFVLGIAQWAIPVDAN
TLLAVSGMNGDNTDSQKLNKIISEIQALQEVVARFRQLRLDATEFACLKCIVTFKAVPTH
SGSELRSFRNAAAIAALQDEAQLTLNSYIHTRYPTQPCRFGKLLLLLPALRSISPSTIEE
VFFKKTIGNVPITRLLSDMYKSSDI

Cation Channel Sperm-Associated Protein 3 (CATSPER3)
(e.g., GenBank Accession Number NP 821138 (SEQ ID NO: 154):
>refseqp|NP_821138|NP_821138 cation channel, sperm associated 3
[Homo sapiens].
MSQHRHQRHSRVISSSPVDTTSVGFCPTFKKFKRNDDECRAFVKRVIMSRFFKIIMISTV
TSNAFFMALWTSYDIRYRLFRLLEFSEIFFVSICTSELSMKVYVDPINYWKNGYNLLDVI
IIIVMFLPYALRQLMGKQFTYLYIADGMQSLRILKLIGYSQGIRTLITAVGQTVYTVASV
LLLLFLLMYIFAILGFCLFGSPDNGDHDNWGNLAAAFFTLFSLATVDGWTDLQKQLDNRE
FALSRAFTIIFILLASFIFLNMFVGVMIMHTEDSIRKFERELMLEQQEMLMGEKQVILQR
QQEEISRLMHIQKNADCTSFSELVENFKKTLSHTDPMVLDDFGTSLPFIDIYFSTLDYQD
TTVHKLQELYYEIVHVLSLMLEDLPQEKPQSLEKVDEK

Transmembrane EMP24 Domain-Containing Protein 1 (TMED1 )
(e.g., GenBank Accession Number NP_006849 (SEQ ID NO: 155):
>refseqp|NP_006849|NP_006849 interleukin 1 receptor-like 1
ligand precursor [Homo sapiens]
MMAAGAALALALWLLMPPVEVGGAGPPPIQDGEFTFLLPAGRKQCFYQSAPANASLETEY
QVIGGAGLDVDFTLESPQGVLLVSESRKADGVHTVEPTEAGDYKLCFDNSFSTISEKLVF
FELIFDSLQDDEEVEGWAEAVEPEEMLDVKMEDIKESIETMRTRLERSIQMLTLLRAFEA
RDRNLQEGNLERVNFWSAVNVAVLLLVAVLQVCTLKRFFQDKRPVPT

Protein FAM154A(FAM154A)
(e.g., GenBank Accession Number NP_714218 (SEQ ID NO: 156):
>refseqp|NP_714918|NP_714918 hypothetical protein LOC158297
[Homo sapiens].
MKTKCICELCSCGRHHCPHLPTKIYDETEKPCLLSEYTENYPFYHSYLPRESFKPRREYQ
KGSIPMEGLTTSRRDFGPHKVAPVKVHQYDQFVPSEENMDLLTTYKKDYNPYPVCRVDPI
KPRDSKYPCSDKMECLPTYKADYLPWNQPRREPLRLEHKYQPASVRFDNRTTHQDDYPIK
GLVKTISCKPLAMPKLCNIPLEDVTNYKMSYVAHPVEKRFVHEAEKFRPCEIPFESLTTQ
KQSYRGLMGEPAKSLKPLARPPGLDMPFCNTTEFRDKYQAWPMPRMFSKAPITYVPPEDR
MDLLTTVQAHYTCPKGAPAQSCRPALQIKKCGRFEGSSTTKDDYKQWSSMRTEPVKPVPQ
LDLPTEPLDCLTTTRAHYVPHLPINTKSCKPHWSGPRGNVPVESQTTYTISFTPKEMGRC
LASYPEPPGYTFEEVDALGHRIYKPVSQAGSQQSSHLSVDDSENPNQRELEVLA

Isoform 1 Of Transcriptional Repressor NF-X1 (NFX1)
(e.g., GenBank Accession Number NP_002495 (SEQ ID NO: 157):
>refseqp|NP_002495|NP_002495 nuclear transcription factor,
X-box binding 1 isoform 1 [Homo sapiens].
MAEAPPVSGTFKFNTDAAEFIPQEKKNSGLNCGTQRRLDSNRIGRRNYSSPPPCHLSRQV
PYDEISAVHQHSYHPSGSKPKSQQTSFQSSPCNKSPKSHGLQNQPWQKLRNEKHHIRVKK
AQSLAEQTSDTAGLESSTRSESGTDLREHSPSESEKEVVGADPRGAKPKKATQFVYSYGR
GPKVKGKLKCEWSNRTTPKPEDAGPESTKPVGVFHPDSSEASSRKGVLDGYGARRNEQRR
YPQKRPPWEVEGARPRPGRNPPKQEGHRHTNAGHRNNMGPIPKDDLNERPAKSTCDSENL
AVINKSSRRVDQEKCTVRRQDPQVVSPFSRGKQNHVLKNVETHTGSLIEQLTTEKYECMV
CCELVRVTAPVWSCQSCYHVFHLNCIKKWARSPASQADGQSGWRCPACQNVSAHVPNTYT
CFCGKVKNPEWSRNEIPHSCGEVCRKKQPGQDCPHSCNLLCHPGPCPPCPAFMTKTCECG
RTRHTVRCGQAVSVHCSNPCENILNCGQHQCAELCHGGQCQPCQIILNQVCYCGSTSRDV
LCGTDVGKSDGFGDFSCLKICGKDLKCGNHTCSQVCHPQPCQQCPRLPQLVRCCPCGQTP
LSQLLELGSSSRKTCMDPVPSCGKVCGKPLPCGSLDFIHTCEKLCHEGDCGPCSRTSVIS
CRCSFRTKELPCTSLKSEDATFMCDKRCNKKRLCGRHKCNEICCVDKEHKCPLICGRKLR
CGLHRCEEPCHRGNCQTCWQASFDELTCHCGASVIYPPVPCGTRPPECTQTCARVHECDH
PVYHSCHSEEKCPPCTFLTQKWCMGKHEFRSNIPCHLVDISCGLPCSATLPCGMHKCQRL
CHKGECLVDEPCKQPCTTPRADCGHPCMAPCHTSSPCPVTACKAKVELQCECGRRKEMVI
CSEASSTYQRIAAISMASKITDMQLGGSVEISKLITKKEVHQARLECDEECSALERKKRL
AEAFHISEDSDPFNIRSSGSKFSDSLKEDARKDLKFVSDVEKEMETLVEAVNKGKNSKKS
HSFPPMNRDHRRIIHDLAQVYGLESVSYDSEPKRNVVVTAIRGKSVCPPTTLTGVLEREM
QARPPPPIPHHRHQSDKNPGSSNLQKITKEPIIDYFDVQD

[0157] The invention illustratively described herein suitably can be practiced in the absence of any element or elements, limitation or limitations that are not specifically disclosed herein. Thus, for example, in each instance herein any of the terms “comprising”, “consisting essentially of”, and “consisting of” may be replaced with either of the other two terms, while retaining their ordinary meanings. The terms and expressions which have been employed are used as terms of description and not of limitation, and there is no intention that in the use of such terms and expressions of excluding any equivalents of the features shown and described or portions thereof, but it is recognized that various modifications are possible within the scope of the invention claimed. Thus, it should be understood that although the present invention has been specifically disclosed by embodiments, optional features, modification and variation of the concepts herein disclosed may be resorted to by those skilled in the art, and that such modifications and variations are considered to be within the scope of this invention as defined by the description and the appended claims.

[0158] In addition, where features or aspects of the invention are described in terms of Markush groups or other grouping of alternatives, those skilled in the art will recognize that the invention is also thereby described in terms of any individual member or subgroup of members of the Markush group or other group.

### EXAMPLES

### Example 1

### Paired Autologous Colon Adenocarcinoma and Healthy Tissue Specimens.

[0159] Colon adenocarcinoma stages I-IV and autologous healthy tissue from regions of the large bowel adjacent to the tumors were obtained from the Asterand XpressBank (Detroit, Mich.). The samples provided by Asterand had been harvested and quick frozen to preserve intact any potential antigen that was present at the time of harvest. Minimal degradation of the tissues was confirmed by the RNA profile. The tissues were stored at −80° C. until used.

### Tissue and Sample Preparation for Generation of Polyclonal Antibodies in Chickens (YPAbs).

[0160] Approximately 50 mg of the frozen stages I-IV colon cancer tissue specimens were separately shaved, thawed on ice, and homogenized. The protein concentration of the samples were adjusted to 1 mg/ml, mixed with Freund's Complete Adjuvant and used to immunize and boost 2 chickens per sample. Colon cancer stages I-IV-specific immune YPAbs, obtained from the eggs three weeks following the following final boost, were tested for reactivity using western blotting against the corresponding stage-specific tumor tissue homogenate (data not shown). Strong and broadly reactive YPabs were purified from 6 eggs per chicken, aliquoted and stored at 4° C. until used. Only results for Stage IV colon cancer tissues are shown.

Assessment of Reactivity of Stage IV YPAbs with Pooled Sera of Patients Diagnosed with Stage IV Colon Cancer.

[0161] Reactivity was assessed using a dot immunoblot assay. The results, shown in FIG. 1, indicate differential reactivity of spotted pooled sera from stage IV colon cancer patients when compared with spots of control serum from age, gender and ethnicity-matched healthy patients (spot 4), BSA (spot 3), and homogenates of healthy tissue (spot 1). A homogenate of stage IV cancer tissue was the positive control (spot 2).

Subtraction of Antibodies Reactive with Proteins Expressed by Healthy Tissue.

[0162] The high titer, broadly reactive YPAbs elicited by homogenates of tumor tissue from each of the 4 stages of colon cancer were repeatedly adsorbed using homogenates of healthy bowel tissue obtained from the autologous host. The proteins in the homogenate were bound to a solid support and the YPAbs were allowed to incubate overnight with gentle rocking at 4° C. Unbound antibodies were recovered and the adsorption process was repeated twice more until ELISA and western blots showed essentially no reactivity with proteins present in healthy tissue. Remaining antibodies were recovered and purified for use in the following steps. Alternatively, in one study, antibodies raised against stage IV tumor tissue were subtracted with serum from healthy subjects. The subtraction was performed by binding the serum components to a solid support and treating the antibody preparation as described above.

### Change Mediated Antigen Capture and Protein Identification.

[0163] Unadsorbed antibodies were recovered, purified, and covalently bound to Dynabeads M-280 Tosyl-activated according to the manufacturer's (Dynal Biotech) directions to create “charged” magnetic beads. For immunocapture, homogenates (1 mg/ml) of the staged tumors were matched to their appropriately staged charged beads. Five ml of homogenates were incubated with 0.5 ml of charged beads for 1 h at 4° C. with tilt rotation. Following immunocapture, charged beads were washed with 10 bead volumes of wash buffer (PBS-0.2% NOG). Specifically bound proteins were elated with 1 M acetic acid. Many shed proteins were identified (sec SEQ ID NOs:1-157). The negative control consisted of elutants from an identical volume of uncharged beads used to immunocapture proteins from the homogenates. Proteins specifically bound by charged beads and controls were fractionated on 1D SDS-PAGE, stained with Coomassie blue, and sliced into sections. Protein bands contained in each gel slice were digested in-gel using the enzyme trypsin, eluted from the gel slice, and identified by GeLC-MS/MS and Mascot database searching (IP1 human protein database) at the University of Florida Interdisciplinary Center for Biotechnology Research (ICBR).

[0164] A similar format was used to pan serum of stage IV cancer patients for shed change mediated proteins. One ml of scrum from five patients (5 ml total) was pooled and incubated with 0.5 ml of charged beads for 1 h at 4° C. with tilt rotation. Following immunocapture, charged beads were washed with 10 bead volumes of wash buffer (PBS-0.2% NOG). Specifically bound proteins were eluted with 1 M acetic acid. Three shed proteins were identified, the details of which are shown in Table 1.

TABLE 1
PCMAT-identified shed proteins in pooled serum
of patients with stage IV colon carcinoma

| | | # of | |
|---|---|---|---|
| # | Protein | peptides | Comments |
| 1 | ApoA1 | 2 | Associated with colon adenocarcinoma |
| SEQ ID | | | progression, and a confirmed marker |
| NO: 105 | | | of aggression |
| 2 | C4A | 8 | Complement component 4A of the |
| SEQ ID | | | classical activation pathway |
| NO: 106 | | | |
| 3 | C3 187 | 7 | Complement component C3, which plays |
| SEQ ID | kDa | | a central role in activation of both |
| NO: 107 | protein | | the classical and alternate |
| | | | complement systems |

The application's sequence listing, which the Patent Office published only in electronic form, follows.

SEQUENCE LISTING (157 sequences)

SEQ ID NO: 1 - protein, 34350 aa, Homo sapiens
MTTQAPTFTQPLQSVVVLEGSTATFEAHISGFPVPEVSWFRDGQVISTSTLPGVQISFSDGRAKLTIPAVTKANSGRYSLKATNGSGQATSTAELLVKAETAPPNFVQRLQSMTVRQGSQVRLQVRVTGIPTPVVKFYRDGAEIQSSLDFQISQEGDLYSLLIAEAYPEDSGTYSVNATNSVGRATSTAELLVQGEEEVPAKKTKTIVSTAQISESRQTRIEKKIEAHFDARSIATVEMVIDGAAGQQLPHKTPHRIPPKPKSRSPTPPSIAAKAQLARQQSPSPIRHSPSPVRHVRAPTPSPVRSVSPAARISTSPIRSVRSPLLMRKTQASTVATGPEVPPPWKQEGYVASSSEAEMRETTLTTSTQIRTEERWEGRYGVQEQVTISGAAGAAASVSASASYAAEAVATGAKEVKQDADKSAAVATVVAAVDMARVREPVISAVEQTAQRTTTTAVHIQPAQEQVRKEAEKTAVTKVVVAADKAKEQELKSRTKEVITTKQEQMHVTHEQIRKETEKTFVPKVVISAAKAKEQETRISEEITKKQKQVTQEAIRQETEITAASMVVVATAKSTKLETVPGAQEETTTQQDQMHLSYEKIMKETRKTVVPKVIVATPKVKEQDLVSRGREGITTKREQVQITQEKMRKEAEKTALSTIAVATAKAKEQETILRTRETMATRQEQIQVTHGKVDVGKKAEAVATVVAAVDQARVREPREPGHLEESYAQQTTLEYGYKERISAAKVAEPPQRPASEPHVVPKAVKPRVIQAPSETHIKTTDQKGMHISSQIKKTTDLTTERLVHVDKRPRTASPHFTVSKISVPKTEHGYEASIAGSAIATLQKELSATSSAQKITKSVKAPTVKPSETRVRAEPTPLPQFPFADTPDTYKSEAGVEVKKEVGVSITGTTVREERFEVLHGREAKVTETARVPAPVEIPVTPPTLVSGLKNVTVIEGESVTLECHISGYPSPTVTWYREDYQIESSIDFQITFQSGIARLMIREAFAEDSGRFTCSAVNEAGTVSTSCYLAVQVSEEFEKETTAVTEKFTTEEKRFVESRDVVMTDTSLTEEQAGPGEPAAPYFITKPVVQKLVEGGSVVFGCQVGGNPKPHVYWKKSGVPLTTGYRYKVSYNKQTGECKLVISMTFADDAGEYTIVVRNKHGETSASASLLEEADYELLMKSQQEMLYQTQVTAFVQEPKVGETAPGFVYSEYEKEYEKEQALIRKKMAKDTVVVRTYVEDQEFHISSFEERLIKEIEYRIIKTTLEELLEEDGEEKMAVDISESEAVESGFDLRIKNYRILEGMGVTFHCKMSGYPLPKIAWYKDGKRIKHGERYQMDFLQDGRASLRIPVVLPEDEGIYTAFASNIKGNAICSGKLYVEPAAPLGAPTYIPTLEPVSRIRSLSPRSVSRSPIRMSPARMSPARMSPARMSPARMSPGRRLEETDESQLERLYKPVFVLKPVSFKCLEGQTARFDLKVVGRPMPETFWFHDGQQIVNDYTHKVVIKEDGTQSLIIVPATPSDSGEWTVVAQNRAGRSSISVILTVEAVEHQVKPMFVEKLKNVNIKEGSQLEMKVRATGNPNPDIVWLKNSDIIVPHKYPKIRIEGTKGEAALKIDSTVSQDSAWYTATAINKAGRDTTRCKVNVEVEFAEPEPERKLIIPRGTYRAKEIAAPELEPLHLRYGQEQWEEGDLYDKEKQQKPFFKKKLTSLRLKRFGPAHFECRLTPIGDPTMVVEWLHDGKPLEAANRLRMINEFGYCSLDYGVAYSRDSGIITCRATNKYGTDHTSATLIVKDEKSLVEESQLPEGRKGLQRIEELERMAHEGALTGVTTDQKEKQKPDIVLYPEPVRVLEGETARFRCRVTGYPQPKVNWYLNGQLIRKSKRFRVRYDGIHYLDIVDCKSYDTGEVKVTAENPEGVIEHKVKLEIQQREDFRSVLRRAPEPRPEFHVHEPGKLQFEVQKVDRPVDTTETKEVVKLKRAERITHEKVPEESEELRSKFKRRTEEGYYEAITAVELKSRKKDESYEELLRKTKDELLHWTKELTEEEKKALAEEGKITIPTFKPDKIELSPSMEAPKIFERIQSQTVGQGSDAHFRVRVVGKPDPECEWYKNGVKIERSDRIYWYWPEDNVCELVIRDVTAEDSASIMVKAINIAGETSSHAFLLVQAKQLITFTQELQDVVAKEKDTMATFECETSEPFVKVKWYKDGMEVHEGDKYRMHSDRKVHFLSILTIDTSDAEDYSCVLVEDENVKTTAKLIVEGAVVEFVKELQDIEVPESYSGELECIVSPENIEGKWYHNDVELKSNGKYTITSRRGRQNLTVKDVTKEDQGEYSFVIDGKKTTCKLKMKPRPIAILQGLSDQKVCEGDIVQLEVKVSLESVEGVWMKDGQEVQPSDRVHIVIDKQSHMLLIEDMTKEDAGNYSFTIPALGLSTSGRVSVYSVDVITPLKDVNVIEGTKAVLECKVSVPDVTSVKWYLNDEQIKPDDRVQAIVKGTKQRLVINRTHASDEGPYKLIVGRVETNCNLSVEKIKIIRGLRDLTCTETQNVVFEVELSHSGIDVLWNFKDKEIKPSSKYKIEAHGKIYKLTVLNMMKDDEGKYTFYAGENITSGKLTVAGGAISKPLTDQTVAESQEAVFECEVANPDSKGEWLRDGKHLPLTNNIRSESDGHKRRLIIAATKLDDIGEYTYKVATSKTSAKLKVEAVKIKKTLKNLTVTETQDAVFTVELTHPNVKGVQWIKNGVVLESNEKYAISVKGTIYSLRIKNCAIVDESVYGFRLGRLGASARLHVETVKIIKKPKDVTALENATVAFEVSVSHDTVPVKWFHKNVEIKPSDKHRLVSERKVHKLMLQNISPSDAGEYTAVVGQLECKAKLFVETLHITKTMKNIEVPETKTASFECEVSHFNVPSMWLKNGVEIEMSEKFKIVVQGKLHQLIIMNTSTEDSAEYTFVCGNDQVSATLTVTPIMITSMLKDINAEEKDTITFEVTVNYEGISYKWLKNGVEIKSTDKCQMRTKKLTHSLNIRNVHFGDAADYTFVAGKATSTATLYVEARHIEFRKHIKDIKVLEKKRAMFECEVSEPDITVQWMKDDQELQITDRIKIQKEKYVHRLLIPSTRMSDAGKYTVVAGGNVSTAKLFVEGRDVRIRSIKKEVQVIEKQRAVVEFEVNEDDVDAHWYKDGIEINFQVQERHKYVVERRIHRMFISETRQSDAGEYTFVAGRNRSSVTLYVNAPEPPQVLQELQPVTVQSGKPARFCAVISGRPQPKISWYKEEQLLSTGFKCKFLHDGQEYTLLLIEAFPEDAAVYTCEAKNDYGVATTSASLSVEVPEVVSPDQEMPVYPPAIITPLQDTVTSEGQPARFQCRVSGTDLKVSWYSKDKKIKPSRFFRMTQFEDTYQLEIAEAYPEDEGTYTFVASNAVGQVSSTANLSLEAPESILHERIEQEIEMEMKEFSSSFLSAEEEGLHSAELQLSKINETLELLSESPVYSTKFDSEKEGTGPIFIKEVSNADISMGDVATLSVTVIGIPKPKIQWFFNGVLLTPSADYKFVFDGDDHSLIILFTKLEDEGEYTCMASNDYGKTICSAYLKINSKGEGHKDTETESAVAKSLEKLGGPCPPHFLKELKPIRCAQGLPAIFEYTVVGEPAPTVTWFKENKQLCTSVYYTIIHNPNGSGTFIVNDPQREDSGLYICKAENMLGESTCAAELLVLLEDTDMTDTPCKAKSTPEAPEDFPQTPLKGPAVEALDSEQEIATFVKDTILKAALITEENQQLSYEHIAKANELSSQLPLGAQELQSILEQDKLTPESTREFLCINGSIHFQPLKEPSPNLQLQIVQSQKTFSKEGILMPEEPETQAVLSDTEKIFPSAMSIEQINSLTVEPLKTLLAEPEGNYPQSSIEPPMHSYLTSVAEEVLSPKEKTVSDTNREQRVTLQKQEAQSALILSQSLAEGHVESLQSPDVMISQVNYEPLVPSEHSCTEGGKILIESANPLENAGQDSAVRIEEGKSLRFPLALEEKQVLLKEEHSDNVVMPPDQIIESKREPVAIKKVQEVQGRDLLSKESLLSGIPEEQRLNLKIQICRALQAAVASEQPGLFSEWLRNIEKVEVEAVNITQEPRHIMCMYLVTSAKSVTEEVTIIIEDVDPQMANLKMELRDALCAIIYEEIDILTAEGPRIQQGAKTSLQEEMDSFSGSQKVEPITEPEVESKYLISTEEVSYFNVQSRVKYLDATPVTKGVASAVVSDEKQDESLKPSEEKEESSSESGTEEVATVKIQEAEGGLIKEDGPMIHTPLVDTVSEEGDIVHLTTSITNAKEVNWYFENKLVPSDEKFKCLQDQNTYTLVIDKVNTEDHQGEYVCEALNDSGKTATSAKLTVVKRAAPVIKRKIEPLEVALGHLAKFTCEIQSAPNVRFQWFKAGREIYESDKCSIRSSKYISSLEILRTQVVDCGEYTCKASNEYGSVSCTATLTVTEAYPPTFLSRPKSLTTFVGKAAKFICTVTGTPVIETIWQKDGAALSPSPNWKISDAENKHILELSNLTIQDRGVYSCKASNKFGADICQAELIIIDKPHFIKELEPVQSAINKKVHLECQVDEDRKVTVTWSKDGQKLPPGKDYKICFEDKIATLEIPLAKLKDSGTYVCTASNEAGSSSCSATVTVREPPSFVKKVDPSYLMLPGESARLHCKLKGSPVIQVTWFKNNKELSESNTVRMYFVNSEAILDITDVKVEDSGSYSCEAVNDVGSDSCSTEIVIKEPPSFIKTLEPADIVRGTNALLQCEVSGTGPFEISWFKDKKQIRSSKKYRLFSQKSLVCLEIFSFNSADVGEYECVVANEVGKCGCMATHLLKEPPTFVKKVDDLIALGGQTVTLQAAVRGSEPISVTWMKGQEVIREDGKIKMSFSNGVAVLIIPDVQISFGGKYTCLAENEAGSQTSVGELIVKEPAKIIERAELIQVTAGDPATLEYTVAGTPELKPKWYKDGRPLVASKKYRISFKNNVAQLKFYSAELHDSGQYTFEISNEVGSSSCETTFTVLDRDIAPFFTKPLRNVDSVVNGTCRLDCKIAGSLPMRVSWFKDGKEIAASDRYRIAFVEGTASLEIIRVDMNDAGNFTCRATNSVGSKDSSGALIVQEPPSFVTKPGSKDVLPGSAVCLKSTFQGSTPLTIRWFKGNKELVSGGSCYITKEALESSLELYLVKTSDSGTYTCKVSNVAGGVECSANLFVKEPATFVEKLEPSQLLKKGDATQLACKVTGTPPIKITWFANDREIKESSKHRMSFVESTAVLRLTDVGIEDSGEYMCEAQNEAGSDHCSSIVIVKESPYFTKEFKPIEVLKEYDVMLLAEVAGTPPFEITWFKDNTILRSGRKYKTFIQDHLVSLQILKFVAADAGEYQCRVTNEVGSSICSARVTLREPPSFIKKIESTSSLRGGTAAFQATLKGSLPITVTWLKDSDEITEDDNIRMTFENNVASLYLSGIEVKHDGKYVCQAKNDAGIQRCSALLSVKEPATITEEAVSIDVTQGDPATLQVKFSGTKEITAKWFKDGQELTLGSKYKISVTDTVSILKIISTEKKDSGEYTFEVQNDVGRSSCKARINVLDLIIPPSFTKKLKKMDSIKGSFIDLECIVAGSHPISIQWFKDDQEISASEKYKFSFHDNTAFLEISQLEGTDSGTYTCSATNKAGHNQCSGHLTVKEPPYFVEKPQSQDVNPNTRVQLKALVGGTAPMTIKWFKDNKELHSGAARSVWKDDTSTSLELFAAKATDSGTYICQLSNDVGTATSKATLFVKEPPQFIKKPSPVLVLRNGQSTTFECQITGTPKIRVSWYLDGNEITAIQKHGISFIDGLATFQISGARVENSGTYVCEARNDAGTASCSIELKVKEPPTFIRELKPVEVVKYSDVELECEVTGTPPFEVTWLKNNREIRSSKKYTLTDRVSVFNLHITKCDPSDTGEYQCIVSNEGGSCSCSTRVALKEPPSFIKKIENTTTVLKSSATFQSTVAGSPPISITWLKDDQILDEDDNVYISFVDSVATLQIRSVDNGHSGRYTCQAKNESGVERCYAFLLVQEPAQIVEKAKSVDVTEKDPMTLECVVAGTPELKVKWLKDGKQIVPSRYFSMSFENNVASFRIQSVMKQDSGQYTFKVENDFGSSSCDAYLRVLDQNIPPSFTKKLTKMDKVLGSSIHMECKVSGSLPISAQWFKDGKEISTSAKYRLVCHERSVSLEVNNLELEDTANYTCKVSNVAGDDACSGILTVKEPPSFLVKPGRQQAIPDSTVEFKAILKGTPPFKIKWFKDDVELVSGPKCFIGLEGSTSFLNLYSVDASKTGQYTCHVTNDVGSDSCTTMLLVTEPPKFVKKLEASKIVKAGDSSRLECKIAGSPEIRVVWFRNEHELPASDKYRMTFIDSVAVIQMNNLSTEDSGDFICEAQNPAGSTSCSTKVIVKEPPVFSSFPPIVETLKNAEVSLECELSGTPPFEVVWYKDKRQLRSSKKYKIASKNFHTSIHILNVDTSDIGEYHCKAQNEVGSDTCVCTVKLKEPPRFVSKLNSLTVVAGEPAELQASIEGAQPIFVQWLKEKEEVIRESENIRITFVENVATLQFAKAEPANAGKYICQIKNDGGMEENMATLMVLEPAVIVEKAGPMTVTVGETCTLECKVAGTPELSVEWYKDGKLLTSSQKHKFSFYNKISSLRILSVERQDAGTYTFQVQNNVGKSSCTAVVDVSDRAVPPSFTRRLKNTGGVLGASCILECKVAGSSPISVAWFHEKTKIVSGAKYQTTFSDNVCTLQLNSLDSSDMGNYTCVAANVAGSDECRAVLTVQEPPSFVKEPEPLEVLPGKNVTFTSVIRGTPPFKVNWFRGARELVKGDRCNIYFEDTVAELELFNIDISQSGEYTCVVSNNAGQASCTTRLFVKEPAAFLKRLSDHSVEPGKSIILESTYTGTLPISVTWKKDGFNITTSEKCNIVTTEKTCILEILNSTKRDAGQYSCEIENEAGRDVCGALVSTLEPPYFVTELEPLEAAVGDSVSLQCQVAGTPEITVSWYKGDTKLRPTPEYRTYFTNNVATLVFNKVNINDSGEYTCKAENSIGTASSKTVFRIQERQLPPSFARQLKDIEQTVGLPVTLTCRLNGSAPIQVCWYRDGVLLRDDENLQTSFVDNVATLKILQTDLSHSGQYSCSASNPLGTASSSARLTAREPKKSPFFDIKPVSIDVIAGESADFECHVTGAQPMRITWSKDNKEIRPGGNYTITCVGNTPHLRILKVGKGDSGQYTCQATNDVGKDMCSAQLSVKEPPKFVKKLEASKVAKQGESIQLECKISGSPEIKVSWFRNDSELHESWKYNMSFINSVALLTINEASAEDSGDYICEAHNGVGDASCSTALTVKAPPVFTQKPSPVGALKGSDVILQCEISGTPPFEVVWVKDRKQVRNSKKFKITSKHFDTSLHILNLEASDVGEYHCKATNEVGSDTCSCSVKFKEPPRFVKKLSDTSTLIGDAVELRAIVEGFQPISVVWLKDRGEVIRESENTRISFIDNIATLQLGSPEASNSGKYICQIKNDAGMRECSAVLTVLEPARIIEKPEPMTVTTGNPFALECVVTGTPELSAKWFKDGRELSADSKHHITFINKVASLKIPCAEMSDKGLYSFEVKNSVGKSNCTVSVHVSDRIVPPSFIRKLKDVNAILGASVVLECRVSGSAPISVGWFQDGNEIVSGPKCQSSFSENVCTLNLSLLEPSDTGIYTCVAANVAGSDECSAVLTVQEPPSFEQTPDSVEVLPGMSLTFTSVIRGTPPFKVKWFKGSRELVPGESCNISLEDFVTELELFEVQPLESGDYSCLVTNDAGSASCTTHLFVKEPATFVKRLADFSVETGSPIVLEATYTGTPPISVSWIKDEYLISQSERCSITMTEKSTILEILESTIEDYAQYSCLIENEAGQDICEALVSVLEPPYFIEPLEHVEAVIGEPATLQCKVDGTPEIRISWYKEHTKLRSAPAYKMQFKNNVASLVINKVDHSDVGEYSCKADNSVGAVASSAVLVIKERKLPPFFARKLKDVHETLGFPVAFECRINGSEPLQVSWYKDGVLLKDDANLQTSFVHNVATLQILQTDQSHIGQYNCSASNPLGTASSSAKLILSEHEVPPFFDLKPVSVDLALGESGTFKCHVTGTAPIKITWAKDNREIRPGGNYKMTLVENTATLTVLKVGKGDAGQYTCYASNIAGKDSCSAHLGVQEPPRFIKKLEPSRIVKQDEFTRYECKIGGSPEIKVLWYKDETEIQESSKFRMSFVDSVAVLEMHNLSVEDSGDYTCEAHNAAGSASSSTSLKVKEPPIFRKKPHPIETLKGADVHLECELQGTPPFHVSWYKDKRELRSGKKYKIMSENFLTSIHILNVDAADIGEYQCKATNDVGSDTCVGSIALKAPPRFVKKLSDISTVVGKEVQLQTTIEGAEPISVVWFKDKGEIVRESDNIWISYSENIATLQFSRVEPANAGKYTCQIKNDAGMQECFATLSVLEPATIVEKPESIKVTTGDTCTLECTVAGTPELSTKWFKDGKELTSDNKYKISFFNKVSGLKIINVAPSDSGVYSFEVQNPVGKDSCTASLQVSDRTVPPSFTRKLKETNGLSGSSVVMECKVYGSPPISVSWFHEGNEISSGRKYQTTLTDNTCALTVNMLEESDSGDYTCIATNMAGSDECSAPLTVREPPSFVQKPDPMDVLTGTNVTFTSIVKGTPPFSVSWFKGSSELVPGDRCNVSLEDSVAELELFDVDTSQSGEYTCIVSNEAGKASCTTHLYIKAPAKFVKRLNDYSIEKGKPLILEGTFTGTPPISVTWKKNGINVTPSQRCNITTTEKSAILEIPSSTVEDAGQYNCYIENASGKDSCSAQILILEPPYFVKQLEPVKVSVGDSASLQCQLAGTPEIGVSWYKGDTKLRPTTTYKMHFRNNVATLVFNQVDINDSGEYICKAENSVGEVSASTFLTVQEQKLPPSFSRQLRDVQETVGLPVVFDCAISGSEPISVSWYKDGKPLKDSPNVQTSFLDNTATLNIFKTDRSLAGQYSCTATNPIGSASSSARLILTEGKNPPFFDIRLAPVDAVVGESADFECHVTGTQPIKVSWAKDSREIRSGGKYQISYLENSAHLTVLKVDKGDSGQYTCYAVNEVGKDSCTAQLNIKERLIPPSFTKRLSETVEETEGNSFKLEGRVAGSQPITVAWYKNNIEIQPTSNCEITFKNNTLVLQVRKAGMNDAGLYTCKVSNDAGSALCTSSIVIKEPKKPPVFDQHLTPVTVSEGEYVQLSCHVQGSEPIRIQWLKAGREIKPSDRCSFSFASGTAVLELRDVAKADSGDYVCKASNVAGSDTTKSKVTIKDKPAVAPATKKAAVDGRLFFVSEPQSIRVVEKTTATFIAKVGGDPIPNVKWTKGKWRQLNQGGRVFIHQKGDEAKLEIRDTTKTDSGLYRCVAFNEHGEIESNVNLQVDERKKQEKIEGDLRAMLKKTPILKKGAGEEEEIDIMELLKNVDPKEYEKYARMYGITDFRGLLQAFELLKQSQEEETHRLEIEEIERSERDEKEFEELVSFIQQRLSQTEPVTLIKDIENQTVLKDNDAVFEIDIKINYPEIKLSWYKGTEKLEPSDKFEISIDGDRHTLRVKNCQLKDQGNYRLVCGPHIASAKLTVIEPAWERHLQDVTLKEGQTCTMTCQFSVPNVKSEWFRNGRILKPQGRHKTEVEHKVHKLTIADVRAEDQGQYTCKYEDLETSAELRIEAEPIQFTKRIQNIVVSEHQSATFECEVSFDDAIVTWYKGPTELTESQKYNFRNDGRCHYMTIHNVTPDDEGVYSVIARLEPRGEARSTAELYLTTKEIKLELKPPDIPDSRVPIPTMPIRAVPPEEIPPVVAPPIPLLLPTPEEKKPPPKRIEVTKKAVKKDAKKVVAKPKEMTPREEIVKKPPPPTTLIPAKAPEIIDVSSKAEEVKIMTITRKKEVQKEKEAVYEKKQAVHKEKRVFIESFEEPYDELEVEPYTEPFEQPYYEEPDEDYEEIKVEAKKEVHEEWEEDFEEGQEYYEREEGYDEGEEEWEEAYQEREVIQVQKEVYEESHERKVPAKVPEKKAPPPPKVIKKPVIEKIEKTSRRMEEEKVQVTKVPEVSKKIVPQKPSRTPVQEEVIEVKVPAVHTKKMVISEEKMFFASHTEEEVSVTVPEVQKEIVTEEKIHVAVSKRVEPPPKVPELPEKPAPEEVAPVPIPKKVEPPAPKVPEVPKKPVPEEKKPVPVPKKEPAAPPKVPEVPKKPVPEEKIPVPVAKKKEAPPAKVPEVQKRVVTEEKITIVTQREESPPPAVPEIPKKKVPEERKPVPRKEEEVPPPPKVPALPKKPVPEEKVAVPVPVAKKAPPPRAEVSKKTVVEEKRFVAEEKLSFAVPQRVEVTRHEVSAEEEWSYSEEEEGVSISVYREEEREEEEEAEVTEYEVMEEPEEYVVEEKLHIISKRVEAEPAEVTERQEKKIVLKPKIPAKIEEPPPAKVPEAPKKIVPEKKVPAPVPKKEKVPPPKVPEEPKKPVPEKKVPPKVIKMEEPLPAKVTERHMQITQEEKVLVAVTKKEAPPKARVPEEPKRAVPEEKVLKLKPKREEEPPAKVTEFRKRVVKEEKVSIEAPKREPQPIKEVTIMEEKERAYTLEEEAVSVQREEEYEEYEEYDYKEFEEYEPTEEYDQYEEYEEREYERYEEHEEYITEPEKPIPVKPVPEEPVPTKPKAPPAKVLKKAVPEEKVPVPIPKKLKPPPPKVPEEPKKVFEEKIRISITKREKEQVTEPAAKVPMKPKRVVAEEKVPVPRKEVAPPVRVPEVPKELEPEEVAFEEEVVTHVEEYLVEEEEEYIHEEEEFITEEEVVPVIPVKVPEVPRKPVPEEKKPVPVPKKKEAPPAKVPEVPKKPEEKVPVLIPKKEKPPPAKVPEVPKKPVPEEKVPVPVPKKVEAPPAKVPEVPKKPVPEKKVPVPAPKKVEAPPAKVPEVPKKLIPEEKKPTPVPKKVEAPPPKVPKKREPVPVPVALPQEEEVLFEEEIVPEEEVLPEEEEVLPEEEEVLPEEEEVLPEEEEIPPEEEEVPPEEEYVPEEEEFVPEEEVLPEVKPKVPVPAPVPEIKKKVTEKKVVIPKKEEAPPAKVPEVPKKVEEKRIILPKEEEVLPVEVTEEPEEEPISEEEIPEEPPSIEEVEEVAPPRVPEVIKKAVPEAPTPVPKKVEAPPAKVSKKIPEEKVPVPVQKKEAPPAKVPEVPKKVPEKKVLVPKKEAVPPAKGRTVLEEKVSVAFRQEVVVKERLELEVVEAEVEEIPEEEEFHEVEEYFEEGEFHEVEEFIKLEQHRVEEEHRVEKVHRVIEVFEAEEVEVFEKPKAPPKGPEISEKIIPPKKPPTKVVPRKEPPAKVPEVPKKIVVEEKVRVPEEPRVPPTKVPDVLPPKEVVPEKKVPVPPAKKPEAPPPKVPEAPKEVVPEKKVPVPPPKKPEVPPTKVPEVPKAAVPEKKVPEAIPPKPESPPPEVPEAPKEVVPEKKVPAAPPKKPEVTPVKVPEAPKEVVPEKKVPVPPPKKPEVPPTKVPEVPKVAVPEKKVPEAIPPKPESPPPEVFEEPEEVALEEPPAEVVEEPEPAAPPQVTVPPKKPVPEKKAPAVVAKKPELPPVKVPEVPKEVVPEKKVPLVVPKKPEAPPAKVPEVPKEVVPEKKVAVPKKPEVPPAKVPEVPKKPVLEEKPAVPVPERAESPPPEVYEEPEEIAPEEEIAPEEEKPVPVAEEEEPEVPPPAVPEEPKKIIPEKKVPVIKKPEAPPPKEPEPEKVIEKPKLKPRPPPPPPAPPKEDVKEKIFQLKAIPKKKVPEKPQVPEKVELTPLKVPGGEKKVRKLLPERKPEPKEEVVLKSVLRKRPEEEEPKVEPKKLEKVKKPAVPEPPPPKPVEEVEVPTVTKRERKIPEPTKVPEIKPAIPLPAPEPKPKPEAEVKTIKPPPVEPEPTPIAAPVTVPVVGKKAEAKAPKEEAAKPKGPIKGVPKKTPSPIEAERRKLRPGSGGEKPPDEAPFTYQLKAVPLKFVKEIKDIILTESEFVGSSAIFECLVSPSTAITTWMKDGSNIRESPKHRFIADGKDRKLHIIDVQLSDAGEYTCVLRLGNKEKTSTAKLVVEELPVRFVKTLEEEVTVVKGQPLYLSCELNKERDVVWRKDGKIVVEKPGRIVPGVIGLMRALTINDADDTDAGTYTVTVENANNLECSSCVKVVEVIRDWLVKPIRDQHVKPKGTAIFACDIAKDTPNIKWFKGYDEIPAEPNDKTEILRDGNHLYLKIKNAMPEDIAEYAVEIEGKRYPAKLTLGEREVELLKPIEDVTIYEKESASFDAEISEADIPGQWKLKGELLRPSPTCEIKAEGGKRFLTLRKVKLDQAGEVLYQALNAITTAILTVKEIELDFAVPLKDVTVPERRQARFECVLTREANVIWSKGPDIIKSSDKFDIIADGKKHILVINDSQFDDEGVYTAEVEGKKTSARLFVTGIRLKFMSPLEDQTVKEGETATFVCELSHEKMHVVWFKNDAKLHTSRTVLISSEGKTHKLEMKEVTLDDISQIKAQVKELSSTAQLKVLEADPYFTVKLHDKTAVEKDEITLKCEVSKDVPVKWFKDGEEIVPSPKYSIKADGLRRILKIKKADLKDKGEYVCDCGTDKTKANVTVEARLIKVEKPLYGVEVFVGETAHFEIELSEPDVHGQWKLKGQPLTASPDCEIIEDGKKHILILHNCQLGMTGEVSFQAANAKSAANLKVKELPLIFITPLSDVKVFEKDEAKFECEVSREPKTFRWLKGTQEITGDDRFELIKDGTKHSMVIKSAAFEDEAKYMFEAEDKHTSGKLIIEGIRLKFLTPLKDVTAKEKESAVFTVELSHDNIRVKWFKNDQRLHTTRSVSMQDEGKTHSITFKDLSIDDTSQIRVEAMGMSSEAKLTVLEGDPYFTGKLQDYTGVEKDEVILQCEISKADAPVKWFKDGKEIKPSKNAVIKADGKKRMLILKKALKSDIGQYTCDCGTDKTSGKLDIEDREIKLVRPLHSVEVMETETARFETEISEDDIHANWKLKGEALLQTPDCEIKEEGKIHSLVLHNCRLDQTGGVDFQAANVKSSAHLRVKPRVIGLLRPLKDVTVTAGETATFDCELSYEDIPVEWYLKGKKLEPSDKVVPRSEGKVHTLTLRDVKLEDAGEVQLTAKDFKTHANLFVKEPPVEFTKPLEDQTVEEGATAVLECEVSRENAKVKWFKNGTEILKSKKYEIVADGRVRKLVIHDCTPEDIKTYTCDAKDFKTSCNLNVVPPHVEFLRPLTDLQVREKEMARFECELSRENAKVKWFKDGAEIKKGKKYDIISKGAVRILVINKCLLDDEAEYSCEVRTARTSGMLTVLEEEAVFTKNLANIEVSETDTIKLVCEVSKPGAEVIWYKGDEEIIETGRYEILTEGRKRILVIQNAHLEDAGNYNCRLPSSRTDGKVKVHELAAEFISKPQNLEILEGEKAEFVCSISKESFPVQWKRDDKTLESGDKYDVIADGKKRVLVVKDATLQDMGTYVVMVGAARAAAHLTVIEKLRIVVPLKDTRVKEQQEVVFNCEVNTEGAKAKWFRNEEAIFDSSKYIILQKDLVYTLRIRDAHLDDQANYNVSLTNHRGENVKSAANLIVEEEDLRIVEPLKDIETMEKKSVTFWCKVNRLNVTLKWTKNGEEVPFDNRVSYRVDKYKHMLTIKDCGFPDEGEYIVTAGQDKSVAELLIIEAPTEFVEHLEDQTVTEFDDAVFSCQLSREKANVKWYRNGREIKEGKKYKFEKDGSIHRLIIKDCRLDDECEYACGVEDRKSRARLFVEEIPVEIIRPPQDILEAPGADVVFLAELNKDKVEVQWLRNNMVVVQGDKHQMMSEGKIHRLQICDIKPRDQGEYRFIAKDKEARAKLELAAAPKIKTADQDLVVDVGKPLTMVVPYDAYPKAEAEWFKENEPLSTKTIDTTAEQTSFRILEAKKGDKGRYKIVLQNKHGKAEGFINLKVIDVPGPVRNLEVTETFDGEVSLAWEEPLTDGGSKIIGYVVERRDIKRKTWVLATDRAESCEFTVTGLQKGGVEYLFRVSARNRVGTGEPVETDNPVEARSKYDVPGPPLNVTITDVNRFGVSLTWEPPEYDGGAEITNYVIELRDKTSIRWDTAMTVRAEDLSATVTDVVEGQEYSFRVRAQNRIGVGKPSAATPFVKVADPIERPSPPVNLTSSDQTQSSVQLKWEPPLKDGGSPILGYIIERCEEGKDNWIRCNMKLVPELTYKVTGLEKGNKYLYRVSAENKAGVSDPSEILGPLTADDAFVEPTMDLSAFKDGLEVIVPNPITILVPSTGYPRPTATWCFGDKVLETGDRVKMKTLSAYAELVISPSERSDKGIYTLKLENRVKTISGEIDVNVIARPSAPKELKFGDITKDSVHLTWEPPDDDGGSPLTGYVVEKREVSRKTWTKVMDFVTDLEFTVPDLVQGKEYLFKVCARNKCGPGEPAYVDEPVNMSTPATVPDPPENVKWRDRTANSIFLTWDPPKNDGGSRIKGYIVERCPRGSDKWVACGEPVAETKMEVTGLEEGKWYAYRVKALNRQGASKPSRPTEEIQAVDTQEAPEIFLDVKLLAGLTVKAGTKIELPATVTGKPEPKITWTKADMILKQDKRITIENVPKKSTVTIVDSKRSDTGTYIIEAVNVCGRATAVVEVNVLDKPGPPAAFDITDVTNESCLLTWNPPRDDGGSKITNYVVERRATDSEVWHKLSSTVKDTNFKATKLIPNKEYIFRVAAENMYGVGEPVQASPITAKYQFDPPGPPTRLEPSDITKDAVTLTWCEPDDDGGSPITGYWVERLDPDTDKWVRCNKMPVKDTTYRVKGLTNKKKYRFRVLAENLAGPGKPSKSTEPILIKDPIDPPWPPGKPTVKDVGKTSVRLNWTKPEHDGGAKIESYVIEMLKTGTDEWVRVAEGVPTTQHLLPGLMEGQEYSFRVRAVNKAGESEPSEPSDPVLCREKLYPPSPPRWLEVINITKNTADLKWTVPEKDGGSPITNYIVEKRDVRRKGWQTVDTTVKDTKCTVTPLTEGSLYVFRVAAENAIGQSDYTEIEDSVLAKDTFTTPGPPYALAVVDVTKRHVDLKWEPPKNDGGRPIQRYVIEKKERLGTRWVKAGKTAGPDCNFRVTDVIEGTEVQFQVRAENEAGVGHPSEPTEILSIEDPTSPPSPPLDLHVTDAGRKHIAIAWKPPEKNGGSPIIGYHVEMCPVGTEKWMRVNSRPIKDLKFKVEEGVVPDKEYVLRVRAVNAIGVSEPSEISENVVAKDPDCKPTIDLETHDIIVIEGEKLSIPVPFRAVPVPTVSWHKDGKEVKASDRLTMKNDHISAHLEVPKSVRADAGIYTITLENKLGSATASINVKVIGLPGPCKDIKASDITKSSCKLTWEPPEFDGGTPILHYVLERREAGRRTYIPVMSGENKLSWTVKDLIPNGEYFFRVKAVNKVGGGEYIELKNPVIAQDPKQPPDPPVDVEVHNPTAEAMTITWKPPLYDGGSKIMGYIIEKIAKGEERWKRCNEHLVPILTYTAKGLEEGKEYQFRVRAENAAGISEPSRATPPTKAVDPIDAPKVILRTSLEVKRGDEIALDASISGSPYPTITWIKDENVIVPEEIKKRAAPLVRRRKGEVQEEEPFVLPLTQRLSIDNSKKGESQLRVRDSLRPDHGLYMIKVENDHGIAKAPCTVSVLDTPGPPINFVFEDIRKTSVLCKWEPPLDDGGSEIINYTLEKKDKTKPDSEWIVVTSTLRHCKYSVTKLIEGKEYLFRVRAENRFGPGPPCVSKPLVAKDPFGPPDAPDKPIVEDVTSNSMLVKWNEPKDNGSPILGYWLEKREVNSTHWSRVNKSLLNALKANVDGLLEGLTYVFRVCAENAAGPGKFSPPSDPKTAHDPISPPGPPIPRVTDTSSTTIELEWEPPAFNGGGEIVGYFVDKQLVGTNEWSRCTEKMIKVRQYTVKEIREGADYKLRVSAVNAAGEGPPGETQPVTVAEPQEPPAVELDVSVKGGIQIMAGKTLRIPAVVTGRPVPTKVWTKEEGELDKDRVVIDNVGTKSELIIKDALRKDHGRYVITATNSCGSKFAAARVEVFDVPGPVLDLKPVVTNRKMCLLNWSDPEDDGGSEITGFIIERKDAKMHTWRQPIETERSKCDITGLLEGQEYKFRVIAKNKFGCGPPVEIGPILAVDPLGPPTSPERLTYTERTKSTITLDWKEPRSNGGSPIQGYIIEKRRHDKPDFERVNKRLCPTTSFLVENLDEHQMYEFRVKAVNEIGESEPSLPLNVVIQDDEVPPTIKLRLSVRGDTIKVKAGEPVHIPADVTGLPMPKIEWSKNETVIEKPTDALQITKEEVSRSEAKTELSIPKAVREDKGTYTVTASNRLGSVFRNVHVEVYDRPSPPRNLAVTDIKAESCYLTWDAPLDNGGSEITHYVIDKRDASRKKAEWEEVTNTAVEKRYGIWKLIPNGQYEFRVRAVNKYGISDECKSDKVVIQDPYRLPGPPGKPKVLARTKGSMLVSWTPPLDNGGSPITGYWLEKREEGSPYWSRVSRAPITKVGLKGVEFNVPRLLEGVKYQFRAMAINAAGIGPPSEPSDPEVAGDPIFPPGPPSCPEVKDKTKSSISLGWKPPAKDGGSPIKGYIVEMQEEGTTDWKRVNEPDKLITTCECVVPNLKELRKYRFRVKAVNEAGESEPSDTTGEIPATDIQEEPEVFIDIGAQDCLVCKAGSQIRIPAVIKGRPTPKSSWEFDGKAKKAMKDGVHDIPEDAQLETAENSSVIIIPECKRSHTGKYSITAKNKAGQKTANCRVKVMDVPGPPKDLKVSDITRGSCRLSWKMPDDDGGDRIKGYVIEKRTIDGKAWTKVNPDCGSTTFVVPDLLSEQQYFFRVRAENRFGIGPPVETIQRTTARDPIYPPDPPIKLKIGLITKNTVHLSWKPPKNDGGSPVTHYIVECLAWDPTGTKKEAWRQCNKRDVEELQFTVEDLVEGGEYEFRVKAVNAAGVSKPSATVGPCDCQRPDMPPSIDLKEFMEVEEGTNVNIVAKIKGVPFPTLTWFKAPPKKPDNKEPVLYDTHVNKLVVDDTCTLVIPQSRRSDTGLYTITAVNNLGTASKEMRLNVLGRPGPPVGPIKFESVSADQMTLSWFPPKDDGGSKITNYVIEKREANRKTWVHVSSEPKECTYTIPKLLEGHEYVFRIMAQNKYGIGEPLDSEPETARNLFSVPGAPDKPTVSSVTRNSMTVNWEEPEYDGGSPVTGYWLEMKDTTSKRWKRVNRDPIKAMTLGVSYKVTGLIEGSDYQFRVYAINAAGVGPASLPSDPATARDPIAPPGPPFPKVTDWTKSSADLEWSPPLKDGGSKVTGYIVEYKEEGKEEWEKGKDKEVRGTKLVVTGLKEGAFYKFRVSAVNIAGIGEPGEVTDVIEMKDRLVSPDLQLDASVRDRIVVHAGGVIRIIAYVSGKPPPTVTWNMNERTLPQEATIETTAISSSMVIKNCQRSHQGVYSLLAKNEAGERKKTIIVDVLDVPGPVGTPFLAHNLTNESCKLTWFSPEDDGGSPITNYVIEKRESDRRAWTPVTYTVTRQNATVQGLIQGKAYFFRIAAENSIGMGPFVETSEALVIREPITVPERPEDLEVKEVTKNTVTLTWNPPKYDGGSEIINYVLESRLIGTEKFHKVTNDNLLSRKYTVKGLKEGDTYEYRVSAVNIVGQGKPSFCTKPITCKDELAPPTLHLDFRDKLTIRVGEAFALTGRYSGKPKPKVSWFKDEADVLEDDRTHIKTTPATLALEKIKAKRSDSGKYCVVVENSTGSRKGFCQVNVVDRPGPPVGPVSFDEVTKDYMVISWKPPLDDGGSKITNYIIEKKEVGKDVWMPVTSASAKTTCKVSKLLEGKDYIFRIHAENLYGISDPLVSDSMKAKDRFRVPDAPDQPIVTEVTKDSALVTWNKPHDGGKPITNYILEKRETMSKRWARVTKDPIHPYTKFRVPDLLEGCQYEFRVSAENEIGIGDPSPPSKPVFAKDPIAKPSPPVNPEAIDTTCNSVDLTWQPPRHDGGSKILGYIVEYQKVGDEEWRRANHTPESCPETKYKVTGLRDGQTYKFRVLAVNAAGESDPAHVPEPVLVKDRLEPPELILDANMAREQHIKVGDTLRLSAIIKGVPFPKVTWKKEDRDAPTKARIDVTPVGSKLEIRNAAHEDGGIYSLTVENPAGSKTVSVKVLVLDKPGPPRDLEVSEIRKDSCYLTWKEPLDDGGSVITNYVVERRDVASAQWSPLSATSKKKSHFAKHLNEGNQYLFRVAAENQYGRGPFVETPKPIKALDPLHPPGPPKDLHHVDVDKTEVSLVWNKPDRDGGSPITGYLVEYQEEGTQDWIKFKTVTNLECVVTGLQQGKTYRFRVKAENIVGLGLPDTTIPIECQEKLVPPSVELDVKLIEGLVVKAGTTVRFPAIIRGVPVPTAKWTTDGSEIKTDEHYTVETDNFSSVLTIKNCLRRDTGEYQITVSNAAGSKTVAVHLTVLDVPGPPTGPINILDVTPEHMTISWQPPKDDGGSPVINYIVEKQDTRKDTWGVVSSGSSKTKLKIPHLQKGCEYVFRVRAENKIGVGPPLDSTPTVAKHKFSPPSPPGKPVVTDITENAATVSWTLPKSDGGSPITGYYMERREVTGKWVRVNKTPIADLKFRVTGLYEGNTYEFRVFAENLAGLSKPSPSSDPIKACRPIKPPGPPINPKLKDKSRETADLVWTKPLSDGGSPILGYVVECQKPGTAQWNRINKDELIRQCAFRVPGLIEGNEYRFRIKAANIVGEGEPRELAESVIAKDILHPPEVELDVTCRDVITVRVGQTIRILARVKGRPEPDITWTKEGKVLVREKRVDLIQDLPRVELQIKEAVRADHGKYIISAKNSSGHAQGSAIVNVLDRPGPCQNLKVTNVTKENCTISWENPLDNGGSEITNFIVEYRKPNQKGWSIVASDVTKRLIKANLLANNEYYFRVCAENKVGVGPTIETKTPILAINPIDRPGEPENLHIADKGKTFVYLKWRRPDYDGGSPNLSYHVERRLKGSDDWERVHKGSIKETHYMVDRCVENQIYEFRVQTKNEGGESDWVKTEEVVVKEDLQKPVLDLKLSGVLTVKAGDTIRLEAGVRGKPFPEVAWTKDKDATDLTRSPRVKIDTRADSSKFSLTKAKRSDGGKYVVTATNTAGSFVAYATVNVLDKPGPVRNLKIVDVSSDRCTVCWDPPEDDGGCEIQNYILEKCETKRMVWSTYSATVLTPGTTVTRLIEGNEYIFRVRAENKIGTGPPTESKPVIAKTKYDKPGRPDPPEVTKVSKEEMTVVWNPPEYDGGKSITGYFLEKKEKHSTRWVPVNKSAIPERRMKVQNLLPDHEYQFRVKAENEIGIGEPSLPSRPVVAKDPIEPPGPPTNFRVVDTTKHSITLGWGKPVYDGGAPIIGYVVEMRPKIADASPDEGWKRCNAAAQLVRKEFTVTSLDENQEYEFRVCAQNQVGIGRPAELKEAIKPKEILEPPEIDLDASMRKLVIVRAGCPIRLFAIVRGRPAPKVTWRKVGIDNVVRKGQVDLVDTMAFLVIPNSTRDDSGKYSLTLVNPAGEKAVFVNVRVLDTPGPVSDLKVSDVTKTSCHVSWAPPENDGGSQVTHYIVEKREADRKTWSTVTPEVKKTSFHVTNLVPGNEYYFRVTAVNEYGPGVPTDVPKPVLASDPLSEPDPPRKLEVTEMTKNSATLAWLPPLRDGGAKIDGYITSYREEEQPADRWTEYSVVKDLSLVVTGLKEGKKYKFRVAARNAVGVSLPREAEGVYEAKEQLLPPKILMPEQITIKAGKKLRIEAHVYGKPHPTCKWKKGEDEVVTSSHLAVHKADSSSILIIKDVTRKDSGYYSLTAENSSGTDTQKIKVVVMDAPGPPQPPFDISDIDADACSLSWHIPLEDGGSNITNYIVEKCDVSRGDWVTALASVTKTSCRVGKLIPGQEYIFRVRAENRFGISEPLTSPKMVAQFPFGVPSEPKNARVTKVNKDCIFVAWDRPDSDGGSPIIGYLIERKERNSLLWVKANDTLVRSTEYPCAGLVEGLEYSFRIYALNKAGSSPPSKPTEYVTARMPVDPPGKPEVIDVTKSTVSLIWARPKHDGGSKIIGYFVEACKLPGDKWVRCNTAPHQIPQEEYTATGLEEKAQYQFRAIARTAVNISPPSEPSDPVTILAENVPPRIDLSVAMKSLLTVKAGTNVCLDATVFGKPMPTVSWKKDGTLLKPAEGIKMAMQRNLCTLELFSVNRKDSGDYTITAENSSGSKSATIKLKVLDKPGPPASVKINKMYSDRAMLSWEPPLEDGGSEITNYIVDKRETSRPNWAQVSATVPITSCSVEKLIEGHEYQFRICAENKYGVGDPVFTEPAIAKNPYDPPGRCDPPVISNITKDHMTVSWKPPADDGGSPITGYLLEKRETQAVNWTKVNRKPIIERTLKATGLQEGTEYEFRVTAINKAGPGKPSDASKAAYARDPQYPPAPPAFPKVYDTTRSSVSLSWGKPAYDGGSPIIGYLVEVKRADSDNWVRCNLPQNLQKTRFEVTGLMEDTQYQFRVYAVNKIGYSDPSDVPDKHYPKDILIPPEGELDADLRKTLILRAGVTMRLYVPVKGRPPPKITWSKPNVNLRDRIGLDIKSTDFDTFLRCENVNKYDAGKYILTLENSCGKKEYTIVVKVLDTPGPPVNVTVKEISKDSAYVTWEPPIIDGGSPIINYVVQKRDAERKSWSTVTTECSKTSFRVANLEEGKSYFFRVFAENEYGIGDPGETRDAVKASQTPGPVVDLKVRSVSKSSCSIGWKKPHSDGGSRIIGYVVDFLTEENKWQRVMKSLSLQYSAKDLTEGKEYTFRVSAENENGEGTPSEITVVARDDVVAPDLDLKGLPDLCYLAKENSNFRLKIPIKGKPAPSVSWKKGEDPLATDTRVSVESSAVNTTLIVYDCQKSDAGKYTITLKNVAGTKEGTISIKVVGKPGIPTGPIKFDEVTAEAMTLKWAPPKDDGGSEITNYILEKRDSVNNKWVTCASAVQKTTFRVTRLHEGMEYTFRVSAENKYGVGEGLKSEPIVARHPFDVPDAPPPPNIVDVRHDSVSLTWTDPKKTGGSPITGYHLEFKERNSLLWKRANKTPIRMRDFKVTGLTEGLEYEFRVMAINLAGVGKPSLPSEPVVALDPIDPPGKPEVINITRNSVTLIWTEPKYDGGHKLTGYIVEKRDLPSKSWMKANHVNVPECAFTVTDLVEGGKYEFRIRAKNTAGAISAPSESTETIICKDEYEAPTIVLDPTIKDGLTIKAGDTIVLNAISILGKPLPKSSWSKAGKDIRPSDITQITSTPTSSMLTIKYATRKDAGEYTITATNPFGTKVEHVKVTVLDVPGPPGPVEISNVSAEKATLTWTPPLEDGGSPIKSYILEKRETSRLLWTVVSEDIQSCRHVATKLIQGNEYIFRVSAVNHYGKGEPVQSEPVKMVDRFGPPGPPEKPEVSNVTKNTATVSWKRPVDDGGSEITGYHVERREKKSLRWVRAIKTPVSDLRCKVTGLQEGSTYEFRVSAENRAGIGPPSEASDSVLMKDAAYPPGPPSNPHVTDTTKKSASLAWGKPHYDGGLEITGYVVEHQKVGDEAWIKDTTGTALRITQFVVPDLQTKEKYNFRISAINDAGVGEPAVIPDVEIVEREMAPDFELDAELRRTLVVRAGLSIRIFVPIKGRPAPEVTWTKDNINLKNRANIENTESFTLLIIPECNRYDTGKFVMTIENPAGKKSGFVNVRVLDTPGPVLNLRPTDITKDSVTLHWDLPLIDGGSRITNYIVEKREATRKSYSTATTKCHKCTYKVTGLSEGCEYFFRVMAENEYGIGEPTETTEPVKASEAPSPPDSLNIMDITKSTVSLAWPKPKHDGGSKITGYVIEAQRKGSDQWTHITTVKGLECVVRNLTEGEEYTFQVMAVNSAGRSAPRESRPVIVKEQTMLPELDLRGIYQKLVIAKAGDNIKVEIPVLGRPKPTVTWKKGDQILKQTQRVNFETTATSTILNINECVRSDSGPYPLTARNIVGEVGDVITIQVHDIPGPPTGPIKFDEVSSDFVTFSWDPPENDGGVPISNYVVEMRQTDSTTWVELATTVIRTTYKATRLTTGLEYQFRVKAQNRYGVGPGITSACIVANYPFKVPGPPGTPQVTAVTKDSMTISWHEPLSDGGSPILGYHVERKERNGILWQTVSKALVPGNIFKSSGLTDGIAYEFRVIAENMAGKSKPSKPSEPMLALDPIDPPGKPVPLNITRHTVTLKWAKPEYTGGFKITSYIVEKRDLPNGRWLKANFSNILENEFTVSGLTEDAAYEFRVIAKNAAGAISPPSEPSDAITCRDDVEAPKIKVDVKFKDTVILKAGEAFRLEADVSGRPPPTMEWSKDGKELEGTAKLEIKIADFSTNLVNKDSTRRDSGAYTLTATNPGGFAKHIFNVKVLDRPGPPEGPLAVTEVTSEKCVLSWFPPLDDGGAKIDHYIVQKRETSRLAWTNVASEVQVTKLKVTKLLKGNEYIFRVMAVNKYGVGEPLESEPVLAVNPYGPPDPPKNPEVTTITKDSMVVCWGHPDSDGGSEIINYIVERRDKAGQRWIKCNKKTLTDLRYKVSGLTEGHEYEFRIMAENAAGISAPSPTSPFYKACDTVFKPGPPGNPRVLDTSRSSISIAWNKPIYDGGSEITGYMVEIALPEEDEWQIVTPPAGLKATSYTITGLTENQEYKIRIYAMNSEGLGEPALVPGTPKAEDRMLPPEIELDADLRKVVTIRACCTLRLFVPIKGRPAPEVKWARDHGESLDKASIESTSSYTLLIVGNVNRFDSGKYILTVENSSGSKSAFVNVRVLDTPGPPQDLKVKEVTKTSVTLTWDPPLLDGGSKIKNYIVEKRESTRKAYSTVATNCHKTSWKVDQLQEGCSYYFRVLAENEYGIGLPAETAESVKASERPLPPGKITLMDVTRNSVSLSWEKPEHDGGSRILGYIVEMQTKGSDKWATCATVKVTEATITGLIQGEEYSFRVSAQNEKGISDPRQLSVPVIAKDLVIPPAFKLLFNTFTVLAGEDLKVDVPFIGRPTPAVTWHKDNVPLKQTTRVNAESTENNSLLTIKDACREDVGHYVVKLTNSAGEAIETLNVIVLDKPGPPTGPVKMDEVTADSITLSWGPPKYDGGSSINNYIVEKRDTSTTTWQIVSATVARTTIKACRLKTGCEYQFRIAAENRYGKSTYLNSEPTVAQYPFKVPGPPGTPVVTLSSRDSMEVQWNEPISDGGSRVIGYHLERKERNSILWVKLNKTPIPQTKFKTTGLEEGVEYEFRVSAENIVGIGKPSKVSECYVARDPCDPPGRPEAIIVTRNSVTLQWKKPTYDGGSKITGYIVEKKELPEGRWMKASFTNIIDTHFEVTGLVEDHRYEFRVIARNAAGVFSEPSESTGAITARDEVDPPRISMDPKYKDTIVVHAGESFKVDADIYGKPIPTIQWIKGDQELSNTARLEIKSTDFATSLSVKDAVRVDSGNYILKAKNVAGERSVTVNVKVLDRPGPPEGPVVISGVTAEKCTLAWKPPLQDGGSDIINYIVERRETSRLVWTVVDANVQTLSCKVTKLLEGNEYTFRIMAVNKYGVGEPLESEPVVAKNPFVVPDAPKAPEVTTVTKDSMIVVWERPASDGGSEILGYVLEKRDKEGIRWTRCHKRLIGELRLRVTGLIENHDYEFRVSAENAAGLSEPSPPSAYQKACDPIYKPGPPNNPKVIDITRSSVFLSWSKPIYDGGCEIQGYIVEKCDVSVGEWTMCTPPTGINKTNIEVEKLLEKHEYNFRICAINKAGVGEHADVPGPIIVEEKLEAPDIDLDLELRKIINIRAGGSLRLFVPIKGRPTPEVKWGKVDGEIRDAAIIDVTSSFTSLVLDNVNRYDSGKYTLTLENSSGTKSAFVTVRVLDTPSPPVNLKVTEITKDSVSITWEPPLLDGGSKIKNYIVEKREATRKSYAAVVTNCHKNSWKIDQLQEGCSYYFRVTAENEYGIGLPAQTADPIKVAEVPQPPGKITVDDVTRNSVSLSWTKPEHDGGSKIIQYIVEMQAKHSEKWSECARVKSLQAVITNLTQGEEYLFRVVAVNEKGRSDPRSLAVPIVAKDLVIEPDVKPAFSSYSVQVGQDLKIEVPISGRPKPTITWTKDGLPLKQTTRINVTDSLDLTTLSIKETHKDDGGQYGITVANVVGQKTASIEIVTLDKPDPPKGPVKFDDVSAESITLSWNPPLYTGGCQITNYIVQKRDTTTTVWDVVSATVARTTLKVTKLKTGTEYQFRIFAENRYGQSFALESDPIVAQYPYKEPGPPGTPFATAISKDSMVIQWHEPVNNGGSPVIGYHLERKERNSILWTKVNKTIIHDTQFKAQNLEEGIEYEFRVYAENIVGVGKASKNSECYVARDPCDPPGTPEPIMVKRNEITLQWTKPVYDGGSMITGYIVEKRDLPDGRWMKASFTNVIETQFTVSGLTEDQRYEFRVIAKNAAGAISKPSDSTGPITAKDEVELPRISMDPKFRDTIVVNAGETFRLEADVHGKPLPTIEWLRGDKEIEESARCEIKNTDFKALLIVKDAIRIDGGQYILRASNVAGSKSFPVNVKVLDRPGPPEGPVQVTGVTSEKCSLTWSPPLQDGGSDISHYVVEKRETSRLAWTVVASEVVTNSLKVTKLLEGNEYVFRIMAVNKYGVGEPLESAPVLMKNPFVLPGPPKSLEVTNIAKDSMTVCWNRPDSDGGSEIIGYIVEKRDRSGIRWIKCNKRRITDLRLRVTGLTEDHEYEFRVSAENAAGVGEPSPATVYYKACDPVFKPGPPTNAHIVDTTKNSITLAWGKPIYDGGSEILGYVVEICKADEEEWQIVTPQTGLRVTRFEISKLTEHQEYKIRVCALNKVGLGEATSVPGTVKPEDKLEAPELDLDSELRKGIVVRAGGSARIHIPFKGRPTPEITWSREEGEFTDKVQIEKGVNYTQLSIDNCDRNDAGKYILKLENSSGSKSAFVTVKVLDTPGPPQNLAVKEVRKDSAFLVWEPPIIDGGAKVKNYVIDKRESTRKAYANVSSKCSKTSFKVENLTEGAIYYFRVMAENEFGVGVPVETVDAVKAAEPPSPPGKVTLTDVSQTSASLMWEKPEHDGGSRVLGYVVEMQPKGTEKWSIVAESKVCNAVVTGLSSGQEYQFRVKAYNEKGKSDPRVLGVPVIAKDLTIQPSLKLPFNTYSIQAGEDLKIEIPVIGRPRPNISWVKDGEPLKQTTRVNVEETATSTVLHIKEGNKDDFGKYTVTATNSAGTATENLSVIVLEKPGPPVGPVRFDEVSADFVVISWEPPAYTGGCQISNYIVEKRDTTTTTWHMVSATVARTTIKITKLKTGTEYQFRIFAENRYGKSAPLDSKAVIVQYPFKEPGPPGTPFVTSISKDQMLVQWHEPVNDGGTKIIGYHLEQKEKNSILWVKLNKTPIQDTKFKTTGLDEGLEYEFKVSAENIVGIGKPSKVSECFVARDPCDPPGRPEAIVITRNNVTLKWKKPAYDGGSKITGYIVEKKDLPDGRWMKASFTNVLETEFTVSGLVEDQRYEFRVIARNAAGNFSEPSDSSGAITARDEIDAPNASLDPKYKDVIVVHAGETFVLEADIRGKPIPDVVWSKDGKELEETAARMEIKSTIQKTTLVVKDCIRTDGGQYILKLSNVGGTKSIPITVKVLDRPGPPEGPLKVTGVTAEKCYLAWNPPLQDGGANISHYIIEKRETSRLSWTQVSTEVQALNYKVTKLLPGNEYIFRVMAVNKYGIGEPLESGPVTACNPYKPPGPPSTPEVSAITKDSMVVTWARPVDDGGTEIEGYILEKRDKEGVRWTKCNKKTLTDLRLRVTGLTEGHSYEFRVAAENAAGVGEPSEPSVFYRACDALYPPGPPSNPKVTDTSRSSVSLAWSKPIYDGGAPVKGYVVEVKEAAADEWTTCTPPTGLQGKQFTVTKLKENTEYNFRICAINSEGVGEPATLPGSVVAQERIEPPEIELDADLRKVVVLRASATLRLFVTIKGRPEPEVKWEKAEGILTDRAQIEVTSSFTMLVIDNVTRFDSGRYNLTLENNSGSKTAFVNVRVLDSPSAPVNLTIREVKKDSVTLSWEPPLIDGGAKITNYIVEKRETTRKAYATITNNCTKTTFRIENLQEGCSYYFRVLASNEYGIGLPAETTEPVKVSEPPLPPGRVTLVDVTRNTATIKWEKPESDGGSKITGYVVEMQTKGSEKWSTCTQVKTLEATISGLTAGEEYVFRVAAVNEKGRSDPRQLGVPVIARDIEIKPSVELPFHTFNVKAREQLKIDVPFKGRPQATVNWRKDGQTLKETTRVNVSSSKTVTSLSIKEASKEDVGTYELCVSNSAGSITVPITIIVLDRPGPPGPIRIDEVSCDSITISWNPPEYDGGCQISNYIVEKKETTSTTWHIVSQAVARTSIKIVRLTTGSEYQFRVCAENRYGKSSYSESSAVVAEYPFSPPGPPGTPKVVHATKSTMLVTWQVPVNDGGSRVIGYHLEYKERSSILWSKANKILIADTQMKVSGLDEGLMYEYRVYAENIAGIGKCSKSCEPVPARDPCDPPGQPEVTNITRKSVSLKWSKPHYDGGAKITGYIVERRELPDGRWLKCNYTNIQETYFEVTELTEDQRYEFRVFARNAADSVSEPSESTGPIIVKDDVEPPRVMMDVKFRDVIVVKAGEVLKINADIAGRPLPVISWAKDGIEIEERARTEIISTDNHTLLTVKDCIRRDTGQYVLTLKNVAGTRSVAVNCKVLDKPGPPAGPLEINGLTAEKCSLSWGRPQEDGGADIDYYIVEKRETSHLAWTICEGELQMTSCKVTKLLKGNEYIFRVTGVNKYGVGEPLESVAIKALDPFTVPSPPTSLEITSVTKESMTLCWSRPESDGGSEISGYIIERREKNSLRWVRVNKKPVYDLRVKSTGLREGCEYEYRVYAENAAGLSLPSETSPLIRAEDPVFLPSPPSKPKIVDSGKTTITIAWVKPLFDGGAPITGYTVEYKKSDDTDWKTSIQSLRGTEYTISGLTTGAEYVFRVKSVNKVGASDPSDSSDPQIAKEREEEPLFDIDSEMRKTLIVKAGASFTMTVPFRGRPVPNVLWSKPDTDLRTRAYVDTTDSRTSLTIENANRNDSGKYTLTIQNVLSAASLTLVVKVLDTPGPPTNITVQDVTKESAVLSWDVPENDGGAPVKNYHIEKREASKKAWVSVTNNCNRLSYKVTNLQEGAIYYFRVSGENEFGVGIPAETKEGVKITEKPSPPEKLGVTSISKDSVSLTWLKPEHDGGSRIVHYVVEALEKGQKNWVKCAVAKSTHHVVSGLRENSEYFFRVFAENQAGLSDPRELLLPVLIKEQLEPPEIDMKNFPSHTVYVRAGSNLKVDIPISGKPLPKVTLSRDGVPLKATMRFNTEITAENLTINLKESVTADAGRYEITAANSSGTTKAFINIVVLDRPGPPTGPVVISDITEESVTLKWEPPKYDGGSQVTNYILLKRETSTAVWTEVSATVARTMMKVMKLTTGEEYQFRIKAENRFGISDHIDSACVTVKLPYTTPGPPSTPWVTNVTRESITVGWHEPVSNGGSAVVGYHLEMKDRNSILWQKANKLVIRTTHFKVTTISAGLIYEFRVYAENAAGVGKPSHPSEPVLAIDACEPPRNVRITDISKNSVSLSWQQPAFDGGSKITGYIVERRDLPDGRWTKASFTNVTETQFIISGLTQNSQYEFRVFARNAVGSISNPSEVVGPITCIDSYGGPVIDLPLEYTEVVKYRAGTSVKLRAGISGKPAPTIEWYKDDKELQTNALVCVENTTDLASILIKDADRLNSGCYELKLRNAMGSASATIRVQILDKPGPPGGPIEFKTVTAEKITLLWRPPADDGGAKITHYIVEKRETSRVVWSMVSEHLEECIITTTKIIKGNEYIFRVRAVNKYGIGEPLESDSVVAKNAFVTPGPPGIPEVTKITKNSMTVVWSRPIADGGSDISGYFLEKRDKKSLGWFKVLKETIRDTRQKVTGLTENSDYQYRVCAVNAAGQGPFSEPSEFYKAADPIDPPGPPAKIRIADSTKSSITLGWSKPVYDGGSAVTGYVVEIRQGEEEEWTTVSTKGEVRTTEYVVSNLKPGVNYYFRVSAVNCAGQGEPIEMNEPVQAKDILEAPEIDLDVALRTSVIAKAGEDVQVLIPFKGRPPPTVTWRKDEKNLGSDARYSIENTDSSSLLTIPQVTRNDTGKYILTIENGVGEPKSSTVSVKVLDTPAACQKLQVKHVSRGTVTLLWDPPLIDGGSPIINYVIEKRDATKRTWSVVSHKCSSTSFKLIDLSEKTPFFFRVLAENEIGIGEPCETTEPVKAAEVPAPIRDLSMKDSTKTSVILSWTKPDFDGGSVITEYVVERKGKGEQTWSHAGISKTCEIEVSQLKEQSVLEFRVFAKNEKGLSDPVTIGPITVKELIITPEVDLSDIPGAQVTVRIGHNVHLELPYKGKPKPSISWLKDGLPLKESEFVRFSKTENKITLSIKNAKKEHGGKYTVILDNAVCRIAVPITVITLGPPSKPKGPIRFDEIKADSVILSWDVPEDNGGGEITCYSIEKRETSQTNWKMVCSSVARTTFKVPNLVKDAEYQFRVRAENRYGVSQPLVSSIIVAKHQFRIPGPPGKPVIYNVTSDGMSLTWDAPVYDGGSEVTGFHVEKKERNSILWQKVNTSPISGREYRATGLVEGLDYQFRVYAENSAGLSSPSDPSKFTLAVSPVDPPGTPDYIDVTRETITLKWNPPLRDGGSKIVGYSIEKRQGNERWVRCNFTDVSECQYTVTGLSPGDRYEFRIIARNAVGTISPPSQSSGIIMTRDENVPPIVEFGPEYFDGLIIKSGESLRIKALVQGRPVPRVTWFKDGVEIEKRMNMEITDVLGSTSLFVRDATRDHRGVYTVEAKNASGSAKAEIKVKVQDTPGKVVGPIRFTNITGEKMTLWWDAPLNDGCAPITHYIIEKRETSRLAWALIEDKCEAQSYTAIKLINGNEYQFRVSAVNKFGVGRPLDSDPVVAQIQYTVPDAPGIPEPSNITGNSITLTWARPESDGGSEIQQYILERREKKSTRWVKVISKRPISETRFKVTGLTEGNEYEFHVMAENAAGVGPASGISRLIKCREPVNPPGPPTVVKVTDTSKTTVSLEWSKPVFDGGMEIIGYIIEMCKADLGDWHKVNAEACVKTRYTVTDLQAGEEYKFRVSAINGAGKGDSCEVTGTIKAVDRLTAPELDIDANFKQTHVVRAGASIRLFIAYQGRPTPTAVWSKPDSNLSLRADIHTTDSFSTLTVENCNRNDAGKYTLTVENNSGSKSITFTVKVLDTPGPPGPITFKDVTRGSATLMWDAPLLDGGARIHHYVVEKREASRRSWQVISEKCTRQIFKVNDLAEGVPYYFRVSAVNEYGVGEPYEMPEPIVATEQPAPPRRLDVVDTSKSSAVLAWLKPDHDGGSRITGYLLEMRQKGSDFWVEAGHTKQLTFTVERLVEKTEYEFRVKAKNDAGYSEPREAFSSVIIKEPQIEPTADLTGITNQLITCKAGSPFTIDVPISGRPAPKVTWKLEEMRLKETDRVSITTTKDRTTLTVKDSMRGDSGRYFLTLENTAGVKTFSVTVVVIGRPGPVTGPIEVSSVSAESCVLSWGEPKDGGGTEITNYIVEKRESGTTAWQLVNSSVKRTQIKVTHLTKYMEYSFRVSSENRFGVSKPLESAPIIAEHPFVPPSAPTRPEVYHVSANAMSIRWEEPYHDGGSKIIGYWVEKKERNTILWVKENKVPCLECNYKVTGLVEGLEYQFRTYALNAAGVSKASEASRPIMAQNPVDAPGRPEVTDVTRSTVSLIWSAPAYDGGSKVVGYIIERKPVSEVGDGRWLKCNYTIVSDNFFTVTALSEGDTYEFRVLAKNAAGVISKGSESTGPVTCRDEYAPPKAELDARLHGDLVTIRAGSDLVLDAAVGGKPEPKIIWTKGDKELDLCEKVSLQYTGKRATAVIKFCDRSDSGKYTLTVKNASGTKAVSVMVKVLDSPGPCGKLTVSRVTQEKCTLAWSLPQEDGGAEITHYIVERRETSRLNWVIVEGECPTLSYVVTRLIKNNEYIFRVRAVNKYGPGVPVESEPIVARNSFTIPSPPGIPEEVGTGKEHIIIQWTKPESDGGNEISNYLVDKREKKSLRWTRVNKDYVVYDTRLKVTSLMEGCDYQFRVTAVNAAGNSEPSEASNFISCREPSYTPGPPSAPRVVDTTKHSISLAWTKPMYDGGTDIVGYVLEMQEKDTDQWYRVHTNATIRNTEFTVPDLKMGQKYSFRVAAVNVKGMSEYSESIAEIEPVERIEIPDLELADDLKKTVTIRAGASLRLMVSVSGRPPPVITWSKQGIDLASRAIIDTTESYSLLIVDKVNRYDAGKYTIEAENQSGKKSATVLVKVYDTPGPCPSVKVKEVSRDSVTITWEIPTIDGGAPVNNYIVEKREAAMRAFKTVTTKCSKTLYRISGLVEGTMYYFRVLPENIYGIGEPCETSDAVLVSEVPLVPAKLEVVDVTKSTVTLAWEKPLYDGGSRLTGYVLEACKAGTERWMKVVTLKPTVLEHTVTSLNEGEQYLFRIRAQNEKGVSEPRETVTAVTVQDLRVLPTIDLSTMPQKTIHVPAGRPVELVIPIAGRPPPAASWFFAGSKLRESERVTVETHTKVAKLTIRETTIRDTGEYTLELKNVTGTTSETIKVIILDKPGPPTGPIKIDEIDATSITISWEPPELDGGAPLSGYVVEQRDAHRPGWLPVSESVTRSTFKFTRLTEGNEYVFRVAATNRFGIGSYLQSEVIECRSSIRIPGPPETLQIFDVSRDGMTLTWYPPEDDGGSQVTGYIVERKEVRADRWVRVNKVPVTMTRYRSTGLTEGLEYEHRVTAINARGSGKPSRPSKPIVAMDPIAPPGKPQNPRVTDTTRTSVSLAWSVPEDEGGSKVTGYLIEMQKVDQHEWTKCNTTPTKIREYTLTHLPQGAEYRFRVLACNAGGPGEPAEVPGTVKVTEMLEYPDYELDERYQEGIFVRQGGVIRLTIPIKGKPFPICKWTKEGQDISKRAMIATSETHTELVIKEADRGDSGTYDLVLENKCGKKAVYIKVRVIGSPNSPEGPLEYDDIQVRSVRVSWRPPADDGGADILGYILERREVPKAAWYTIDSRVRGTSLVVKGLKENVEYHFRVSAENQFGISKPLKSEEPVTPKTPLNPPEPPSNPPEVLDVTKSSVSLSWSRPKDDGGSRVTGYYIERKETSTDKWVRHNKTQITTTMYTVTGLVPDAEYQFRIIAQNDVGLSETSPASEPVVCKDPFDKPSQPGELEILSISKDSVTLQWEKPECDGGKEILGYWVEYRQSGDSAWKKSNKERIKDKQFTIGGLLEATEYEFRVFAENETGLSRPRRTAMSIKTKLTSGEAPGIRKEMKDVTTKLGEAAQLSCQIVGRPLPDIKWYRFGKELIQSRKYKMSSDGRTHTLTVMTEEQEDEGVYTCIATNEVGEVETSSKLLLQATPQFHPGYPLKEKYYGAVGSTLRLHVMYIGRPVPAMTWFHGQKLLQNSENITIENTEHYTHLVMKNVQRKTHAGKYKVQLSNVFGTVDAILDVEIQDKPDKPTGPIVIEALLKNSAVISWKPPADDGGSWITNYVVEKCEAKEGAEWQLVSSAISVTTCRIVNLTENAGYYFRVSAQNTFGISDPLEVSSVVIIKSPFEKPGAPGKPTITAVTKDSCVVAWKPPASDGGAKIRNYYLEKREKKQNKWISVTTEEIRETVFSVKNLIEGLEYEFRVKCENLGGESEWSEISEPITPKSDVPIQAPHFKEELRNLNVRYQSNATLVCKVTGHPKPIVKWYRQGKEIIADGLKYRIQEFKGGYHQLIIASVTDDDATVYQVRATNQGGSVSGTASLEVEVPAKIHLPKTLEGMGAVHALRGEVVSIKIPFSGKPDPVITWQKGQDLIDNNGHYQVIVTRSFTSLVFPNGVERKDAGFYVVCAKNRFGIDQKTVELDVADVPDPPRGVKVSDVSRDSVNLTWTEPASDGGSKITNYIVEKCATTAERWLRVGQARETRYTVINLFGKTSYQFRVIAENKFGLSKPSEPSEPTITKEDKTRAMNYDEEVDETREVSMTKASHSSTKELYEKYMIAEDLGRGEFGIVHRCVETSSKKTYMAKFVKVKGTDQVLVKKEISILNIARHRNILHLHESFESMEELVMIFEFISGLDIFERINTSAFELNEREIVSYVHQVCEALQFLHSHNIGHFDIRPENIIYQTRRSSTIKIIEFGQARQLKPGDNFRLLFTAPEYYAPEVHQHDVVSTATDMWSLGTLVYVLLSGINPFLAETNQQIIENIMNAEYTFDEEAFKEISIEAMDFVDRLLVKERKSRMTASEALQHPWLKQKIERVSTKVIRTLKHRRYYHTLIKKDLNMVVSAARISCGGAIRSQKGVSVAKVKVASIEIGPVSGQIMHAVGEEGGHVKYVCKIENYDQSTQVTWYFGVRQLENSEKYEITYEDGVAILYVKDITKLDDGTYRCKVVNDYGEDSSYAELFVKGVREVYDYYCRRTMKKIKRRTDTMRLLERPPEFTLPLYNKTAYVGENVRFGVTITVHPEPHVTWYKSGQKIKPGDNDKKYTFESDKGLYQLTINSVTTDDDAEYTVVARNKYGEDSCKAKLTVTLHPPPTDSTLRPMFKRLLANAECQEGQSVCFEIRVSGIPPPTLKWEKDGQPLSLGPNIEIIHEGLDYYALHIRDTLPEDTGYYRVTATNTAGSTSCQAHLQVERLRYKKQEFKSKEEHERHVQKQIDKTLRMAEILSGTESVPLTQVAKEALREAAVLYKPAVSTKTVKGEFRLEIEEKKEERKLRMPYDVPEPRKYKQTTIEEDQRIKQFVPMSDMKWYKKIRDQYEMPGKLDRVVQKRPKRIRLSRWEQFYVMPLPRITDQYRPKWRIPKLSQDDLEIVRPARRRTPSPDYDFYYRPRRRSLGDISDEELLLPIDDYLAMKRTEEERLRLEEELELGFSASPPSRSPPHFELSSLRYSSPQAHVKVEETRKDFRYSTYHIPTKAEASTSYAELRERHAQAAYRQPKQRQRIMAEREDEELLRPVTTTQHLSEYKSELDFMSKEEKSRKKSRRQREVTEITEIEEEYEISKHAQRESSSSASRLLRRRRSLSPTYIELMRPVSELIRSRPQPAEEYEDDTERRSPTPERTRPRSPSPVSSERSLSRFERSARFDIFSRYESMKAALKTQKTSERKYEVLSQQPFTLDHAPRITLRMRSHRVPCGQNTRFILNVQSKPTAEVKWYHNGVELQESSKIHYTNTSGVLTLEILDCHTDDSGTYRAVCTNYKGEASDYATLDVTGGDYTTYASQRRDEEVPRSVFPELTRTEAYAVSSFKKTSEMEASSSVREVKSQMTETRESLSSYEHSASAEMKSAALEEKSLEEKSTTRKIKTTLAARILTKPRSMTVYEGESARFSCDTDGEPVPTVTWLRKGQVLSTSARHQVTTTKYKSTFEISSVQASDEGNYSVVVENSEGKQEAEFTLTIQKARVTEKAVTSPPRVKSPEPRVKSPEAVKSPKRVKSPEPSHPKAVSPTETKPTPTEKVQHLPVSAPPKITQFLKAEASKEIAKLTCVVESSVLRAKEVTWYKDGKKLKENGHFQFHYSADGTYELKINNLTESDQGEYVCEISGEGGTSKTNLQFMGQAFKSIHEKVSKISETKKSDQKTTESTVTRKTEPKAPEPISSKPVIVTGLQDTTVSSDSVAKFAVKATGEPRPTAIWTKDGKAITQGGKYKLSEDKGGFFLEIHKTDTSDSGLYTCTVKNSAGSVSSSCKLTIKAIKDTEAQKVSTQKTSEITPQKKAVVQEEISQKALRSEEIKMSEAKSQEKLALKEEASKVLISEEVKKSAATSLEKSIVHEEITKTSQASEEVRTHAEIKAFSTQMSINEGQRLVLKANIAGATDVKWVLNGVELTNSEEYRYGVSGSDQTLTIKQASHRDEGILTCISKTKEGIVKCQYDLTLSKELSDAPAFISQPRSQNINEGQNVLFTCEISGEPSPEIEWFKNNLPISISSNVSISRSRNVYSLEIRNASVSDSGKYTIKAKNFRGQCSATASLMVLPLVEEPSREVVLRTSGDTSLQGSFSSQSVQMSASKQEASFSSFSSSSASSMTEMKFASMSAQSMSSMQESFVEMSSSSFMGISNMTQLESSTSKMLKAGIRGIPPKIEALPSDISIDEGKVLTVACAFTGEPTPEVTWSCGGRKIHSQEQGRFHIENTDDLTTLIIMDVQKQDGGLYTLSLGNEFGSDSATVNIHIRSI

SEQ ID NO: 2 - protein, 142 aa, Homo sapiens
MVLSPADKTNVKAAWGKVGAHAGEYGAEALERMFLSFPTTKTYFPHFDLSHGSAQVKGHGKKVADALTNAVAHVDDMPNALSALSDLHAHKLRVDPVNFKLLSHCLLVTLAAHLPAEFTPAVHASLDKFLASVSTVLTSKYR

SEQ ID NO: 3 - protein, 1367 aa, Homo sapiens
MKSGSGGGSPTSLWGLLFLSAALSLWPTSGEICGPGIDIRNDYQQLKRLENCTVIEGYLHILLISKAEDYRSYRFPKLTVITEYLLLFRVAGLESLGDLFPNLTVIRGWKLFYNYALVIFEMTNLKDIGLYNLRNITRGAIRIEKNADLCYLSTVDWSLILDAVSNNYIVGNKPPKECGDLCPGTMEEKPMCEKTTINNEYNYRCWTTNRCQKMCPSTCGKRACTENNECCHPECLGSCSAPDNDTACVACRHYYYAGVCVPACPPNTYRFEGWRCVDRDFCANILSAESSDSEGFVIHDGECMQECPSGFIRNGSQSMYCIPCEGPCPKVCEEEKKTKTIDSVTSAQMLQGCTIFKGNLLINIRRGNNIASELENFMGLIEVVTGYVKIRHSHALVSLSFLKNLRLILGEEQLEGNYSFYVLDNQNLQQLWDWDHRNLTIKAGKMYFAFNPKLCVSEIYRMEEVTGTKGRQSKGDINTRNNGERASCESDVLHFTSTTTSKNRIIITWHRYRPPDYRDLISFTVYYKEAPFKNVTEYDGQDACGSNSWNMVDVDLPPNKDVEPGILLHGLKPWTQYAVYVKAVTLTMVENDHIRGAKSEILYIRTNASVPSIPLDVLSASNSSSQLIVKWNPPSLPNGNLSYYIVRWQRQPQDGYLYRHNYCSKDKIPIRKYADGTIDIEEVTENPKTEVCGGEKGPCCACPKTEAEKQAEKEEAEYRKVFENFLHNSIFVPRPERKRRDVMQVANTTMSSRSRNTTAADTYNITDPEELETEYPFFESRVDNKERTVISNLRPFTLYRIDIHSCNHEAEKLGCSASNFVFARTMPAEGADDIPGPVTWEPRPENSIFLKWPEPENPNGLILMYEIKYGSQVEDQRECVSRQEYRKYGGAKLNRLNPGNYTARIQATSLSGNGSWTDPVFFYVQAKTGYENFIHLIIALPVAVLLIVGGLVIMLYVFHRKRNNSRLGNGVLYASVNPEYFSAADVYVPDEWEVAREKITMSRELGQGSFGMVYEGVAKGVVKDEPETRVAIKTVNEAASMRERIEFLNEASVMKEFNCHHVVRLLGVVSQGQPTLVIMELMTRGDLKSYLRSLRPEMENNPVLAPPSLSKMIQMAGEIADGMAYLNANKFVHRDLAARNCMVAEDFTVKIGDFGMTRDIYETDYYRKGGKGLLPVRWMSPESLKDGVFTTYSDVWSFGVVLWEIATLAEQPYQGLSNEQVLRFVMEGGLLDKPDNCPDMLFELMRMCWQYNPKMRPSFLEIISSIKEEMEPGFREVSFYYSEENKLPEPEELDLEPENMESVPLDPSASSSSLPLPDRHSGHKAENGPGPGVLVLRASFDERQPYAHMNGGRKNERALPLPQSSTC

SEQ ID NO: 4 - protein, 2812 aa, Homo sapiens [sequence omitted]

SEQ ID NO: 5 - protein, 1420 aa, Homo sapiens
MPLANHRDDEHGVASMVSVHVEHPQEASVVVHQVERVSGPWEEADAEAVARAEAAARAEAAAPYTVLAQSAPREDGYSDASGFGYCFRELRGGECASPLPGLRTQEVCCRGAGLAWGVHDCQLCSERLGNSERVSAPDGPCPTGFERVNGSCEDVDECATGGRCQHGECANTRGGYTCVCPDGFLLDSSRSSCISQHVISEAKGPCFRVLRDGGCSLPILRNITKQICCCSRVGKAWGRGCQLCPPFGSEGFREICPAGPGYHYSASDLRYNTRPLGQEPPRVSLSQPRTLPATSRPSAGFLPTHRLEPRPEPRPDPRPGPELPLPSIPAWTGPEIPESGPSSGMCQRNPQVCGPGRCISRPSGYTCACDSGFRLSPQGTRCIDVDECRRVPPPCAPGRCENSPGSFRCVCGPGFRAGPRAAECLDVDECHRVPPPCDLGRCENTPGSFLCVCPAGYQAAPHGASCQDVDECTQSPGLCGRGACKNLPGSFRCVCPAGFRGSACEEDVDECAQEPPPCGPGRCDNTAGSFHCACPAGFRSRGPGAPCQDVDECARSPPPCTYGRCENTEGSFQCVCPMGFQPNTAGSECEDVDECENHLACPGQECVNSPGSFQCRTCPSGHHLHRGRCTDVDECSSGAPPCGPHGHCTNTEGSFRCSCAPGYRAPSGRPGPCADVNECLEGDFCFPHGECLNTDGSFACTCAPGYRPGPRGASCLDVDECSEEDLCQSGICTNTDGSFECICPPGHRAGPDLASCLDVDECRERGPALCGSQRCENSPGSYRCVRDCDPGYHAGPEGTCDDVDECQEYGPEICGAQRCENTPGSYRCTPACDPGYQPTPGGGCQDVDECRNRSFCGAHAVCQNLPGSFQCLCDQYEGARDGRHCVDVNECETLQGVCGAALCENVEGSFLCVCPNSPEEFDPMTGRCVPPRTSAGTFPGSQPQAPASPVLPARPPPPPLPRRPSTPRQGPVGSGRRECYFDTAAPDACDNILARNVTWQECCCTVGEGWGSGCRIQQCPGTETAEYQSLCPHGRGYLAPSGDLSLRRDVDECQLFRDQVCKSGVCVNTAPGYSCYCSNGYYYHTQRLECIDNDECADEEPACEGGRCVNTVGSYHCTCEPPLVLDGSQRRCVSNESQSLDDNLGVCWQEVGADLVCSHPRLDRQATYTECCCLYGEAWGMDCALCPAQDSDDFEALCNVLRPPAYSPPRPGGFGLPYEYGPDLGPPYQGLPYGPELYPPPALPYDPYPPPPGPFARREAPYGAPRFDMPDFEDDGGPYGESEAPAPPGPGTRWPYRSRDTRRSFPEPEEPPEGGSYAGSLAEPYEELEAEECGILDGCTNGRCVRVPEGFTCRCFDGYRLDMTRMACVDINECDEAEAASPLCVNARCLNTDGSFRCICRPGFAPTHQPHHCAPARPRA

SEQ ID NO: 6 - protein, 1541 aa, Homo sapiens
MKDKQKKKKERTWAEAARLVLENYSDAPMTPKQILQVIEAEGLKEMRSGTSPLACLNAMLHSNSRGGEGLFYKLPGRISLFTLKKDALQWSRHPATVEGEEPEDTADVESCGSNEASTVSGENDVSLDETSSNASCSTESQSRPLSNPRDSYRASSQANKQKKKTGVMLPRVVLTPLKVNGAHVESASGFSGCHADGESGSPSSSSSGSLALGSAAIRGQAEVTQDPAPLLRGFRKPATGQMKRNRGEEIDFETPGSILVNTNLRALINSRTFHALPSHFQQQLLFLLPEVDRQVGTDGLLRLSSSALNNEFFTHAAQSWRERLADGEFTHEMQVRIRQEMEKEKKVEQWKEKFFEDYYGQKLGLTKEESLQQNVGQEEAEIKSGLCVPGESVRIQRGPATRQRDGHFKKRSRPDLRTRARRNLYKKQESEQAGVAKDAKSVASDVPLYKDGEAKTDPAGLSSPHLPGTSSAAPDLEGPEFPVESVASRIQAEPDNLARASASPDRIPSLPQETVDQEPKDQKRKSFEQAASASFPEKKPRLEDRQSFRNTIESVHTEKPQPTKEEPKVPPIRIQLSRIKPPWVVKGQPTYQICPRIIPTTESSCRGWTGARTLADIKARALQVRGARGHHCHREAATTAIGGGGGPGGGGGGATDEGGGRGSSSGDGGEACGHPEPRGGPSTPGKCTSDLQRTQLLPPYPLNGEHTQAGTAMSRARREDLPSLRKEESCLLQRATVGLTDGLGDASQLPVAPTGDQPCQALPLLSSQTSVAERLVEQPQLHPDVRTECESGTTSWESDDEEQGPTVPADNGPIPSLVGDDTLEKGTGQALDSHPTMKDPVNVTPSSTPESSPTDCLQNRAFDDELGLGGSCPPMRESDTRQENLKTKALVSNSSLHWIPIPSNDEVVKQPKPESREHIPSVEPQVGEEWEKAAPTPPALPGDLTAEEGLDPLDSLTSLWTVPSRGGSDSNGSYCQQVDIEKLKINGDSEALSPHGESTDTASDFEGHLTEDSSEADTREAAVTKGSSVDKDEKPNWNQSAPLSKVNGDMRLVTRTDGMVAPQSWVSRVCAVRQKIPDSLLLASTEYQPRAVCLSMPGSSVEATNPLVMQLLQGSLPLEKVLPPAHDDSMSESPQVPLTKDQSHGSLRMGSLHGLGKNSGMVDGSSPSSLRALKEPLLPDSCETGTGLARIEATQAPGAPQKNCKAVPSFDSLHPVTNPITSSRKLEEMDSKEQFSSFSCEDQKEVRAMSQDSNSNAAPGKSPGDLTTSRTPRFSSPNVISFGPEQTGRALGDQSNVTGQGKKLFGSGNVAATLQRPRPADPMPLPAEIPPVFPSGKLGPSTNSMSGGVQTPREDWAPKPHAFVGSVKNEKTFVGGPLKANAENRKATGHSPLELVGHLEGMPFVMDLPFWKLPREPGKGLSEPLEPSSLPSQLSIKQAFYGKLSKLQLSSTSFNYSSSSPTFPKGLAGSVVQLSHKANFGASHSASLSLQMFTDSSTVESISLQCACSLKAMIMCQGCGAFCHDDCIGPSKLCVLCLVVR

SEQ ID NO: 7 - protein, 147 aa, Homo sapiens
MVHLTPEEKSAVTALWGKVNVDEVGGEALGRLLVVYPWTQRFFESFGDLSTPDAVMGNPKVKAHGKKVLGAFSDGLAHLDNLKGTFATLSELHCDKLHVDPENFRLLGNVLVCVLAHHFGKEFTPPVQAAYQKVVAGVANALAHKYH

SEQ ID NO: 8 - protein, 392 aa, Homo sapiens
MVLLSILRILFLCELVLFMEHRAQMAEGGQSSIALLAEAPTLPLIEELLEESPGEQPRKPRLLGHSLRYMLELYRRSADSHGHPRENRTIGATMVRLVKPLTNVARPHRGTWHIQILGFPLRPNRGLYQLVRATVVYRHHLQLTRFNLSCHVEPWVQKNPTNHFPSSEGDSSKPSLMSNAWKEMDITQLVQQRFWNNKGHRILRLRFMCQQQKDSGGLELWHGTSSLDIAFLLLYFNDTHKSIRKAKFLPRGMEEFMERESLLRRTRQADGISAEVTASSSKHSGPENNQCSLHPFQISFRQLGWDHWIIAPPFYTPNYCKGTCLRVLRDGLNSPNHAIIQNLINQLVDQSVPRPSCVPYKYVPISVLMIEANGSILYKEYEGMIAESCTCR

SEQ ID NO: 9 - protein, 452 aa, Homo sapiens
MNSGILQVFQGELICPLCMNYFIDPVTIDCGHSFCRPCFYLNWQDIPFLVQCSECTKSTEQINLKTNIHLKKMASLARKVSLWLFLSSEEQMCGTHRETKKIFCEVDRSLLCLLCSSSQEHRYHRHRPIEWAAEEHREKLLQKMQSLWEKACENHRNLNVETTRTRCWKDYVNLRLEAIRAEYQKMPAFHHEEEKHNLEMLKKKGKEIFHRLHLSKAKMAHRMEILRGMYEELNEMCHKPDVELLQAFGDILHRSESVLLHMPQPLNPELSAGPITGLRDRLNQFRVHITLHHEEANNDIFLYEILRSMCIGCDHQDVPYFTATPRSFLAWGVQTFTSGKYYWEVHVGDSWNWAFGVCNMYRKEKNQNEKIDGKAGLFLLGCVKNDIQCSLFTTSPLMLQYIPKPTSRVGLFLDCEAKTVSFVDVNQSSLIYTIPNCSFSPPLRPIFCCIHF

SEQ ID NO: 10 - protein, 358 aa, Homo sapiens
MAPQNLSTFCLLLLYLIGAVIAGRDFYKILGVPRSASIKDIKKAYRKLALQLHPDRNPDDPQAQEKFQDLGAAYEVLSDSEKRKQYDTYGEEGLKDGHQSSHGDIFSHFFGDFGFMFGGTPRQQDRNIPRGSDIIVDLEVTLEEVYAGNFVEVVRNKPVARQAPGKRKCNCRQEMRTTQLGPGRFQMTQEVVCDECPNVKLVNEERTLEVEIEPGVRDGMEYPFIGEGEPHVDGEPGDLRFRIKVVKHPIFERRGDDLYTNVTISLVESLVGFEMDITHLDGHKVHISRDKITRPGAKLWKKGEGLPNFDNNNIKGSLIITFDVDFPKEQLTEEAREGIKQLLKQGSVQKVYNGLQGY

SEQ ID NO: 11 - protein, 78 aa, Homo sapiens
MRGIDTPSDRKKSLKMSLQAKWGPGLDLSKSTRNWWVSNNILWQPHCQGMSVLTRTAPHFPPKVGRRQRLFTEAVQRQ

SEQ ID NO: 12 - protein, 627 aa, Homo sapiens
MKWVTFISLLFLFSSAYSRGVFRRDAHKSEVAHRFKDLGEENFKALVLIAFAQYLQQCPFEDHVKLVNEVTEFAKTCVADESAENCDKSLHTLFGDKLCTVATLRETYGEMADCCAKQEPERNECFLQHKDDNPNLPRLVRPEVDVMCTAFHDNEETFLKKYLYEIARRHPYFYAPELLFFAKRYKAAFTECCQAADKAACLLPKLDELRDEGKASSAKQRLKCASLQKFGERAFKAWAVARLSQRFPKAEFAEVSKLVTDLTKVHTECCHGDLLECADDRADLAKYICENQDSISSKLKECCEKPLLEKSHCIAEVENDEMPADLPSLAADFVESKDVCKNYAEAKDVFLGMFLYEYARRHPDYSVVLLLRLAKTYETTLEKCCAAADPHECYAKVFDEFKPLVEEPQNLIKQNCELFEQLGEYKFQNALLVRYTKKVPQVSTPTLVEVSRNLGKVGSKCCKHPEAKRMPCAEDYLSVVLNQLCVLHEKTPVSDRVTKCCTESLVNRRPCFSALEVDETYVPKEFNAETFTFHADICTLSEKERQIKKQTALVELVKHKPKATKEQLKAVMDDFAAFVEKCCKADDKETCFAEEGQKTCCCKSSCLRLITSHLKASQPTMRIRERK

SEQ ID NO: 13 - protein, 1413 aa, Homo sapiens
MRHGVAWALLVAAALGLGARGVRGAVALADFYPFGAERGDAVTPKQDDGGSGLRPLSVPFPFFGAEHSGLYVNNNGIISFLKEVSQFTPVAFPIAKDRCVVAAFWADVDNRRAGDVYYREATDPAMLRRATEDVRHYFPELLDFNATWVFVATWYRVTFFGGSSSSPVNTFQTVLITDGKLSFTIFNYESIVWTTGTHASSGGNATGLGGIAAQAGFNAGDGQRYFSIPGSRTADMAEVETTTNVGVPGRWAFRIDDAQVRVGGCGHTTSVCLALRPCLNGGKCIDDCVTGNPSYTCSCLSGFTGRRCHLDVNECASQPCQNGGTCTHGINSFRCQCPAGFGGPTCETAQSPCDTKECQHGGQCQVENGSAVCVCQAGYTGAACEMDVDDCSPDPCLNGGSCVDLVGNYTCLCAEPFKGLRCETGDHPVPDACLSAPCHNGGTCVDADQGYVCECPEGFMGLDCRERVPDDCECRNGGRCLGANTTLCQCPLGFFGLLCEFEITAMPCNMNTQCPDGGYCMEHGGSYLCVCHTDHNASHSLPSPCDSDPCFNGGSCDAHDDSYTCECPRGFHGKHCEKARPHLCSSGPCRNGGTCKEAGGEYHCSCPYRFTGRHCEIGKPDSCASGPCHNGGTCFHYIGKYKCDCPPGFSGRHCEIAPSPCFRSPCVNGGTCEDRDTDFFCHCQAGYMGRRCQAEVDCGPPEEVKHATLRFNGTRLGAVALYACDRGYSLSAPSRIRVCQPHGVWSEPPQCLEIDECRSQPCLHGGSCQDRVAGYLCLCSTGYEGAHCELERDECRAHPCRNGGSCRNLPGAYVCRCPAGFVGVHCETEVDACDSSPCQHGGRCESGGGAYLCVCPESFFGYHCETVSDPCFSSPCGGRGYCLASNGSHSCTCKVGYTGEDCAKELFPPTALKMERVEESGVSISWNPPNGPAARQMLDGYAVTYVSSDGSYRRTDFVDRTRSSHQLQALAAGRAYNISVFSVKRNSNNKNDISRPAVLLARTRPRPVEGFEVTNVTASTISVQWALHRIRHATVSGVRVSIRHPEALRDQATDVDRSVDRFTFRALLPGKRYTIQLTTLSGLRGEEHPTESLATAPTHVWTRPLPPANLTAARVTATSAHVVWDAPTPGSLLEAYVINVTTSQSTKSRYVPNGKLASYTVRDLLPGRRYQLSVIAVQSTELGPQHSEPAHLYIITSPRDGADRRWHQGGHHPRVLKNRPPPARLPELRLLNDHSAPETPTQPPRFSELVDGRGRVSARFGGSPSKAATVRSQPTASAQLENMEEAPKRVSLALQLPEHGSKDIGNVPGNCSENPCQNGGTCVPGADAHSCDCGPGFKGRRCELACIKVSRPCTRLFSETKAFPVWEGGVCHHVYKRVYRVHQDICFKESCESTSLKKTPNRKQSKSQTLEKS

SEQ ID NO: 14 - protein, 470 aa, Homo sapiens
MSHHPSGLRAGFSSTSYRRTFGPPPSLSPGAFSYSSSSRFSSSRLLGSASPSSSVRLGSFRSPRAGAGALLRLPSERLDFSMAEALNQEFLATRSNEKQELQELNDRFANFIEKVRFLEQQNAALRGELSQARGQEPARADQLCQQELRELRRELELLGRERDRVQVERDGLAEDLAALKQRLEEETRKREDAEHNLVLFRKDVDDATLSRLELERKIESLMDEIEFLKKLHEEELRDLQVSVESQQVQQVEVEATVKPELTAALRDIRAQYESIAAKNLQEAEEWYKSKYADLSDAANRNHEALRQAKQEMNESRRQIQSLTCEVDGLRGTNEALLRQLRELEEQFALEAGGYQAGAARLEEELRQLKEEMARHLREYQELLNVKMALDIEIATYRKLLEGEESRISVPVHSFASLNIKTTVPEVEPPQDSHSRKTVLIKTIETRNGEVVTESQKEQRSELDKSSAHSY

SEQ ID NO: 15 - protein, 360 aa, Homo sapiens
MAPLGTTVLLWSLLRSSPGVERVCFRARIQPWHGGLLQPLPCSFEMGLPRRRFSSEAAESGSPETKKPTFMDEEVQSILTKMTGLNLQKTFKPAIQELKPPTYKLMTQAQLEEATRQAVEAAKVRLKMPPVLEERVPINDVLAEDKILEGTETTKYVFTDISYSIPHRERFIVVREPSGTLRKASWEERDRMIQVYFPKEGRKILTPIIFKEENLRTMYSQDRHVDVLNLCFAQFEPDSTEYIKVHHKTYEDIDKRGKYDLLRSTRYFGGMVWYFVNNKKIDGLLIDQIQRDLIDDATNLVQLYHVLHPDGQSAQGAKDQAAEGINLIKVFAKTEAQKGAYIELTLQTYQEALSRHSAAS

SEQ ID NO: 16 - protein, 721 aa, Homo sapiens
MAAPVVAPPGVVVSRANKRSGAGPGGSGGGGARGAEEEPPPPLQAVLVADSFDRRFFPISKDQPRVLLPLANVALIDYTLEFLTATGVQETFVFCCWKAAQIKEHLLKSKWCRPTSLNVVRIITSELYRSLGDVLRDVDAKALVRSDFLLVYGDVISNINITRALEEHRLRRKLEKNVSVMTMIFKESSPSHPTRCHEDNVVVAVDSTTNRVLHFQKTQGLRRFAFPLSLFQGSSDGVEVRYDLLDCHISICSPQVAQLFTDNFDYQTRDDFVRGLLVNEEILGNQIHMHVTAKEYGARVSNLHMYSAVCADVIRRWVYPLTPEANFTDSTTQSCTHSRHNIYRGPEVSLGHGSILEENVLLGSGTVIGSNCFITNSVIGPGCHIGDNVVLDQTYLWQGVRVAAGAQIHQSLLCDNAEVKERVTLKPRSVLTSQVVVGPNITLPEGSVISLHPPDAEEDEDDGEFSDDSGADQEKDKVKMKGYNPAEVGAAGKGYLWKAAGMNMEEEEELQQNLWGLKINMEEESESESEQSMDSEEPDSRGGSPQMDDIKVFQNEVLGTLQRGKEENISCDNLVLEINSLKYAYNISLKEVMQVLSHVVLEFPLQQMDSPLDSSRYCALLLPLLKAWSPVFRNYIKRAADHLEALAAIEDFFLEHEALGISMAKVLMAFYQLEILAEETILSWFSQRDTTDKGQQLRKNQQLQRFIQWLKEAEEESSEDD

SEQ ID NO: 17 - protein, 328 aa, Homo sapiens
MARTVVLITGCSSGIGLHLAVRLASDPSQSFKVYATLRDLKTQGRLWEAARALACPPGSLETLQLDVRDSKSVAAARERVTEGRVDVLVCNAGLGLLGPLEALGEDAVASVLDVNVVGTVRMLQAFLPDMKRRGSGRVLVTGSVGGLMGLPFNDVYCASKFALEGLCESLAVLLLPFGVHLSLIECGPVHTAFMEKVLGSPEEVLDRTDIHTFHRFYQYLAHSKQVFREAAQNPEEVAEVFLTALRAPKPTLRYFTTERFLPLLRMRLDDPSGSNYVTAMHREVFGDVPAKAEAGAEAGGGAGPGAEDEAGRSAVGDPELGDPPAAPQ

SEQ ID NO: 18 - protein, 112 aa, Homo sapiens [sequence omitted]

SEQ ID NO: 19 - protein, 1584 aa, Homo sapiens
MRGQAAAPGPVWILAPLLLLLLLLGRRARAAAGADAGPGPEPCATLVQGKFFGYFSAAAVFPANASRCSWTLRNPDPRRYTLYMKVAKAPVPCSGPGRVRTYQFDSFLESTRTYLGVESFDEVLRLCDPSAPLAFLQASKQFLQMRRQQPPQHDGLRPRAGPPGPTDDFSVEYLVVGNRNPSRAACQMLCRWLDACLAGSRSSHPCGIMQTPCACLGGEAGGPAAGPLAPRGDVCLRDAVAGGPENCLTSLTQDRGGHGATGGWKLWSLWGECTRDCGGGLQTRTRTCLPAPGVEGGGCEGVLEEGRQCNREACGPAGRTSSRSQSLRSTDARRREELGDELQQFGFPAPQTGDPAAEEWSPWSVCSSTCGEGWQTRTRFCVSSSYSTQCSGPLREQRLCNNSAVCPVHGAWDEWSPWSLCSSTCGRGFRDRTRTCRPPQFGGNPCEGPEKQTKFCNIALCPGRAVDGNWNEWSSWSACSASCSQGRQQRTRECNGPSYGGAECQGHWVETRDCFLQQCPVDGKWQAWASWGSCSVTCGAGSQRRERVCSGPFFGGAACQGPQDEYRQCGTQRCPEPHEICDEDNFGAVIWKETPAGEVAAVRCPRNATGLILRRCELDEEGIAYWEPPTYIRCVSIDYRNIQMMTREHLAKAQRGLPGEGVSEVIQTLVEISQDGTSYSGDLLSTIDVLRNMTEIFRRAYYSPTPGDVQNFVQILSNLLAEENRDKWEEAQLAGPNAKELFRLVEDFVDVIGFRMKDLRDAYQVTDNLVLSIHKLPASGATDISFPMKGWRATGDWAKVPEDRVTVSKSVFSTGLTEADEASVFVVGTVLYRNLGSFLALQRNTTVLNSKVISVTVKPPPRSLRTPLEIEFAHMYNGTTNQTCILWDETDVPSSSAPPQLGPWSWRGCRTVPLDALRTRCLCDRLSTFAILAQLSADANMEKATLPSVTLIVGCGVSSLTLLMLVIIYVSVWRYIRSERSVILINFCLSIISSNALILIGQTQTRNKVMCTLVAAFLHFFFLSSFCWVLTEAWQSYMAVTGHLRNRLIRKRFLCLGWGLPALVVAISVGFTKAKGYSTMNYCWLSLEGGLLYAFVGPAAAVVLVNMVIGILVFNKLVSKDGITDKKLKERAGASLWSSCVVLPLLALTWMSAVLAVTDRRSALFQILFAVFDSLEGFVIVMVHCILRREVQDAVKCRVVDRQEEGNGDSGGSFQNGHAQLMTDFEKDVDLACRSVLNKDIAACRTATITGTLKRPSLPEEEKLKLAHAKGPPTNFNSLPANVSKLHLHGSPRYPGGPLPDFPNHSLTLKRDKAPKSSFVGDGDIFKKLDSELSRAQEKALDTSYVILPTATATLRPKPKEEPKYSIHIDQMPQTRLIHLSTAPEASLPARSPPSRQPPSGGPPEAPPAQPPPPPPPPPPPPQQPLPPPPNLEPAPPSLGDPGEPAAHPGPSTGPSTKNENVATLSVSSLERRKSRYAELDFEKIMHTRKRHQDMFQDLNRKLQHAAEKDKEVLGPDSKPEKQQTPNKRPWESLRKAHGTPTWVKKELEPLQPSPLELRSVEWERSGATIPLVGQDIIDLQTEV

SEQ ID NO: 20 - protein, 1191 aa, Homo sapiens
MPVQAAQWTEFLSCPICYNEFDENVHKPISLGCSHTVCKTCLNKLHRKACPFDQTAINTDIDVLPVNFALLQLVGAQVPDHQSIKLSNLGENKHYEVAKKCVEDLALYLKPLSGGKGVASLNQSALSRPMQRKLVTLVNCQLVEEEGRVRAMRAARSLGERTVTELILQHQNPQQLSANLWAAVRARGCQFLGPAMQEEALKLVLLALEDGSALSRKVLVLFVVQRLEPRFPQASKTSIGHVVQLLYRASCFKVTKRDEDSSLMQLKEEFRSYEALRREHDAQIVHIAMEAGLRISPEQWSSLLYGDLAHKSHMQSIIDKLQSPESFAKSVQELTIVLQRTGDPANLNRLRPHLELLANIDPNPDAVSPTWEQLENAMVAVKTVVHGLVDFIQNYSRKGHETPQPQPNSKYKTSMCRDLRQQGGCPRGTNCTFAHSQEELEKYRLRNKKINATVRTFPLLNKVGVNNTVTTTAGNVISVIGSTETTGKIVPSTNGISNAENSVSQLISRSTDSTLRALETVKKVGKVGANGQNAAGPSADSVTENKIGSPPKTPVSNVAATSAGPSNVGTELNSVPQKSSPFLTRVPVYPPHSENIQYFQDPRTQIPFEVPQYPQTGYYPPPPTVPAGVAPCVPRFVRSNNVPESSLPPASMPYADHYSTFSPRDRMNSSPYQPPPPQPYGPVPPVPSGMYAPVYDSRRIWRPPMYQRDDIIRSNSLPPMDVMHSSVYQTSLRERYNSLDGYYSVACQPPSEPRTTVPLPREPCGHLKTSCEEQIRRKPDQWAQYHTQKAPLVSSTLPVATQSPTPPSPLFSVDFRADFSESVSGTKFEEDHLSHYSPWSCGTIGSCINAIDSEPKDVIANSNAVLMDLDSGDVKRRVHLFETQRRTKEEDPIIPFSDGPIISKWGAISRSSRTGYHTTDPVQATASQGSATKPISVSDYVPYVNAVDSRWSSYGNEATSSAHYVERDRFIVTDLSGHRKHSSTGDLLSLELQQAKSNSLLLQREANALAMQQKWNSLDEGRHLTLNLLSKEIELRNGELQSDYTEDATDTKPDRDIELELSALDTDEPDGQSEPIEEILDIQLGISSQNDQLLNGMAVENGHPVQQHQKEPPKQKKQSLGEDHVILEEQKTILPVTSCFSQPLPVSISNASCLPITTSVSAGNLILKTHVMSEDKNDFLKPVANGKMVNS

SEQ ID NO: 21 - protein, 147 aa, Homo sapiens; identical to SEQ ID NO: 7

SEQ ID NO: 22 - protein, 644 aa, Homo sapiens
MADYSTVPPPSSGSAGGGGGGGGGGGVNDAFKDALQRARQIAAKIGGDAGTSLNSNDYGYGGQKRPLEDGDQPDAKKVAPQNDSFGTQLPPMHQQQSRSVMTEEYKVPDGMVGFIIGRGGEQISRIQQESGCKIQIAPDSGGLPERSCMLTGTPESVQSAKRLLDQIVEKGRPAPGFHHGDGPGNAVQEIMIPASKAGLVIGKGGETIKQLQERAGVKMVMIQDGPQNTGADKPLRITGDPYKVQQAKEMVLELIRDQGGFREVRNEYGSRIGGNEGIDVPIPRFAVGIVIGRNGEMIKKIQNDAGVRIQFKPDDGTTPERIAQITGPPDRCQHAAEIITDLLRSVQAGNPGGPGPGGRGRGRGQGNWNMGPPGGLQEFNFIVPTGKTGLIIGKGGETIKSISQQSGARIELQRNPPPNADPNMKLFTIRGTPQQIDYARQLIEEKIGGPVNPLGPPVPHGPHGVPGPHGPPGPPGPGTPMGPYNPAPYNPGPPGPAPHGPPAPYAPQGWGNAYPHWQQQAPPDPAKAGTDPNSAAWAAYYAHYYQQQAQPPPAAPAGAPTTTQTNGQGDQQNPAPAGQVDYTKAWEEYYKKMGQAVPAPTGAPPGGQPDYSAAWAEYYRQQAAYYAQTSPQGMPQHPPAPQGQ

SEQ ID NO: 23 - protein, 250 aa, Homo sapiens
MADNFSLHDALSGSGNPNPQGWPGAWGNQPAGAGGYPGASYPGAYPGQAPPGAYPGQAPPGAYHGAPGAYPGAPAPGVYPGPPSGPGAYPSSGQPSAPGAYPATGPYGAPAGPLIVPYNLPLPGGVVPRMLITILGTVKPNANRIALDFQRGNDVAFHFNPRFNENNRRVIVCNTKLDNNWGREERQSVFPFESGKPFKIQVLVEPDHFKVAVNDAHLLQYNHRVKKLNEISKLGISGDIDLTSASYTMI

SEQ ID NO: 24 - protein, 148 aa, Homo sapiens
MKALIVLGLVLLSVTVQGKVFERCELARTLKRLGMDGYRGISLANWMCLAKWESGYNTRATNYNAGDRSTDYGIFQINSRYWCNDGKTPGAVNACHLSCSALLQDNIADAVACAKRVVRDPQGIRAWVAWRNRCQNRDVRQYVQGCGV

SEQ ID NO: 25 - protein, 377 aa, Homo sapiens
MCDEDETTALVCDNGSGLVKAGFAGDDAPRAVFPSIVGRPRHQGVMVGMGQKDSYVGDEAQSKRGILTLKYPIEHGIITNWDDMEKIWHHTFYNELRVAPEEHPTLLTEAPLNPKANREKMTQIMFETFNVPAMYVAIQAVLSLYASGRTTGIVLDSGDGVTHNVPIYEGYALPHAIMRLDLAGRDLTDYLMKILTERGYSFVTTAEREIVRDIKEKLCYVALDFENEMATAASSSSLEKSYELPDGQVITIGNERFRCPETLFQPSFIGMESAGIHETTYNSIMKCDIDIRKDLYANNVMSGGTTMYPGIADRMQKEITALAPSTMKIKIIAPPERKYSVWIGGSILASLSTFQQMWITKQEYDEAGPSIVHRKCF

SEQ ID NO: 26 - protein, 531 aa, Homo sapiens
MSKPHSEAGTAFIQTQQLHAAMADTFLEHMCRLDIDSPPITARNTGIICTIGPASRSVETLKEMIKSGMNVARLNFSHGTHEYHAETIKNVRTATESFASDPILYRPVAVALDTKGPEIRTGLIKGSGTAEVELKKGATLKITLDNAYMEKCDENILWLDYKNICKVVEVGSKIYVDDGLISLQVKQKGADFLVTEVENGGSLGSKKGVNLPGAAVDLPAVSEKDIQDLKFGVEQDVDMVFASFIRKASDVHEVRKVLGEKGKNIKIISKIENHEGVRRFDEILEASDGIMVARGDLGIEIPAEKVFLAQKMMIGRCNRAGKPVICATQMLESMIKKPRPTRAEGSDVANAVLDGADCIMLSGETAKGDYPLEAVRMQHLIAREAEAAIYHLQLFEELRRLAPITSDPTEATAVGAVEASFKCCSGAIIVLTKSGRSAHQVARYRPRAPIIAVTRNPQTARQAHLYRGIFPVLCKDPVQEAWAEDVDLRVNFAMNVGKARGFFKKGDVVIVLTGWRPGSGFTNTMRVVPVP

SEQ ID NO: 27 - protein, 175 aa, Homo sapiens
MEKIPVSAFLLLVALSYTLARDTTVKPGAKKDTKDSRPKLPQTLSRGWGDQLIWTQTYEEALYKSKTSNKPLMIIHHLDECPHSQALKKVFAENKEIQKLAEQFVLLNLVYETTDKHLSPDGQYVPRIMFVDPSLTVRADITGRYSNRLYAYEPADTALLLDNMKKALKLLKTEL

SEQ ID NO: 28 - protein, 94 aa, Homo sapiens
MRTLAILAAILLVALQAQAEPLQARADEVAAAPEQIAADIPEVVVSLAWDESLAPKHPGSRKNMACYCRIPACIAGERRYGTCIYQGRLWAFCC

SEQ ID NO: 29 - protein, 256 aa, Homo sapiens
MAHRPPSPALASVLLALLLSGAARAAEIVGGHEAQPHSRPYMASLQMRGNPGSHFCGGTLIHPSFVLTAAHCLRDIPQRLVNVVLGAHNVRTQEPTQQHFSVAQVFLNNYDAENKLNDVLLIQLSSPANLSASVATVQLPQQDQPVPHGTQCLAMGWGRVGAHDPPAQVLQELNVTVVTFFCRPHNICTFVPRRKAGICFGDSGGPLICDGIIQGIDSFVIWGCATRLFPDFFTRVALYVDWIRSTLRRVEAKGRP

SEQ ID NO: 30 - protein, 239 aa, Homo sapiens [sequence omitted]

SEQ ID NO: 31 - protein, 445 aa, Homo sapiens
MREIVHLQAGQCGNQIGAKFWEVISDEHGIDPTGTYHGDSDLQLERINVYYNEATGGKYVPRAVLVDLEPGTMDSVRSGPFGQIFRPDNFVFGQSGAGNNWAKGHYTEGAELVDSVLDVVRKEAESCDCLQGFQLTHSLGGGTGSGMGTLLISKIREEYPDRIMNTFSVVPSPKVSDTVVEPYNATLSVHQLVENTDETYCIDNEALYDICFRTLKLTTPTYGDLNHLVSATMSGVTTCLRFPGQLNADLRKLAVNMVPFPRLHFFMPGFAPLTSRGSQQYRALTVPELTQQMFDAKNMMAACDPRHGRYLTVAAVFRGRMSMKEVDEQMLNVQNKNSSYFVEWIPNNVKTAVCDIPPRGLKMSATFIGNSTAIQELFKRISEQFTAMFRRKAFLHWYTGEGMDEMEFTEAESNMNDLVSEYQQYQDATAEEEGEFEEEAEEEVA

SEQ ID NO: 32 - protein, 297 aa, Homo sapiens
MVHQVLYRALVSTKWLAESIRTGKLGPGLRVLDASWYSPGTREARKEYLERHVPGASFFDIEECRDTASPYEMMLPSEAGFAEYVGRLGISNHTHVVVYDGEHLGSFYAPRVWWMFRVFGHRTVSVLNGGFRNWLKEGHPVTSEPSRPEPAVFKATLDRSLLKTYEQVLENLESKRFQLVDSRSQGRFLGTEPEPDAVGLDSGHIRGAVNMPFMDFLTEDGFEKGPEELRALFQTKKVDLSQPLIATCRKGVTACHVALAAYLCGKPDVAVYDGSWSEWFRRAPPESRVSQGKSEKA

SEQ ID NO: 33 - protein, 641 aa, Homo sapiens
MAKAAAIGIDLGTTYSCVGVFQHGKVEIIANDQGNRTTPSYVAFTDTERLIGDAAKNQVALNPQNTVFDAKRLIGRKFGDPVVQSDMKHWPFQVINDGDKPKVQVSYKGETKAFYPEEISSMVLTKMKEIAEAYLGYPVTNAVITVPAYFNDSQRQATKDAGVIAGLNVLRIINEPTAAAIAYGLDRTGKGERNVLIFDLGGGTFDVSILTIDDGIFEVKATAGDTHLGGEDFDNRLVNHFVEEFKRKHKKDISQNKRAVRRLRTACERAKRTLSSSTQASLEIDSLFEGIDFYTSITRARFEELCSDLFRSTLEPVEKALRDAKLDKAQIHDLVLVGGSTRIPKVQKLLQDFFNGRDLNKSINPDEAVAYGAAVQAAILMGDKSENVQDLLLLDVAPLSLGLETAGGVMTALIKRNSTIPTKQTQIFTTYSDNQPGVLIQVYEGERAMTKDNNLLGRFELSGIPPAPRGVPQIEVTFDIDANGILNVTATDKSTGKANKITITNDKGRLSKEEIERMVQEAEKYKAEDEVQRERVSAKNALESYAFNMKSAVEDEGLKGKISEADKKKVLDKCQEVISWLDANTLAEKDEFEHKRKELEQVCNPIISGLYQGAGGPGPGGFGAQGPKGGSGSGPTIEEVD

SEQ ID NO: 34 - protein, 109 aa, Homo sapiens [sequence omitted]

SEQ ID NO: 35 - protein, 115 aa, Homo sapiens
MPMFIVNTNVPRASVPDGFLSELTQQLAQATGKPPQYIAVHVVPDQLMAFGGSSEPCALCSLHSIGKIGGAQNRSYSKLLCGLLAERLRISPDRVYINYYDMNAANVGWNNSTFA

SEQ ID NO: 36 - protein, 161 aa, Homo sapiens
MAGRKLALKTIDWVAFAEIIPQNQKAIASSLKSWNETLTSRLAALPENPPAIDWAYYKANVAKAGLVDDFEKKFNALKVPVPEDKYTAQVDAEEKEDVKSCAEWVSLSKARIVEYEKEMEKMKNLIPFDQMTIEDLNEAFPETKLDKKKYPYWPHQPIENL

SEQ ID NO: 37 - protein, 263 aa, Homo sapiens
MVVDKNKRLTKGGKKGAKKKVVDPFSKKDWYDVNAPAMFNIRNIGKTLVTRTQGTKIASDGRVFEVSLADLQNDEVAFRKFKLITEDVQGKNCLTNFHGVDLTSDKMCSMVKKWQTMIEAHVDVKTTDGYLLRLFCVGFTKKRNNQIRKTSYAQHQQVLTSQIRKKMMEIMTREVQTNDLKEVVNKLIPDSIGKDVEKACQSIYPLHDVFVRKVKMLKKPKFELGKLMELHGEGCSSGKATGDETGVKVERADGYELPVQESV

SEQ ID NO: 38 - protein, 414 aa, Homo sapiens
MSKKISGGSVVEMQGDEMTRIIWELIKEKLIFPYVELDLHSYDLGIENRDATNDQVTKDAAEAIKKHNVGVKCATITPDEKRVEEFKLKQMWKSPNGTIRNILGGTVFREAIICKNIPRLVSGWVKPIIIGRHAYGDQYRATDFVVPGPGKVEITYTPSDGTQKVTYLVHNFEEGGGVAMGMYNQDKSIEDFAHSSFQMALSKGWPLYLSTKNTILKKYDGRFKDIFQEIYDKQYKSQFEAQKIWYEHRLIDDMVAQAMKSEGGFIWACKNYDGDVQSDSVAQGYGSLGMMTSVLVCPDGKTVEAEAAHGTVTRHYRMYQKGQETSTNPIASIFAWTRGLAHRAKLDNNKELAFFANALEEVSIETIEAGFMTKDLAACIKGLPNVQRSDYLNTFEFMDKLGENLKIKLAQAKL

SEQ ID NO: 39 - protein, 147 aa, Homo sapiens
MVHLTPEEKTAVNALWGKVNVDAVGGEALGRLLVVYPWTQRFFESFGDLSSPDAVMGNPKVKAHGKKVLGAFSDGLAHLDNLKGTFSQLSELHCDKLHVDPENFRLLGNVLVCVLARNFGKEFTPQMQAAYQKVVAGVANALAHKYH

SEQ ID NO: 40 - protein, 238 aa, Homo sapiens
MSRYGRYGGETKVYVGNLGTGAGKGELERAFSYYGPLRTVWIARNPPGFAFVEFEDPRDAEDAVRGLDGKVICGSRVRVELSTGMPRRSRFDRPPARRPFDPNDRCYECGEKGHYAYDCHRYSRRRRSRSRSRSHSRSRGRRYSRSRSRSRGRRSRSASPRRSRSISLRRSRSASLRRSRSGSIKGSRYFQSPSRSRSRSRSISRPRSSRSKSRSPSPKRSRSPSGSPRRSASPERMD

SEQ ID NO: 41 - protein, 597 aa, Homo sapiens
MAHNKIPPRWLNCPRRGQPVAGRFLPLKTMLGPRYDSQVAEENRFHPSMLSNYLKSLKVKMGLLVDLTNTSRFYDRNDIEKEGIKYIKLQCKGHGECPTTENTETFIRLCERFNERNPPELIGVHCTHGFNRTGFLICAFLVEKMDWSIEAAVATFAQARPPGIYKGDYLKELFRRYGDIEEAPPPPLLPDWCFEDDEDEDEDEDGKKESEPGSSASFGKRRKERLKLGAIFLEGVTVKGVTQVTTQPKLGEVQQKCHQFCGWEGSGFPGAQPVSMDKQNIKLLDLKPYKVSWKADGTRYMMLIDGTNEVFMIDRDNSVFHVSNLEFPFRKDLRMHLSNTLLDGEMIIDRVNGQAVPRYLIYDIIKFNSQPVGDCDFNVRLQCIEREIISPRHEKMKTGLIDKTQEPFSVRNKPFFDICTSRKLLEGNFAKEVSHEMDGLIFQPTGKYKPGRCDDILKWKPPSLNSVDFRLKITRMGGEGLLPQNVGLLYVGGYERPFAQIKVTKELKQYDNKIIECKFENNSWVFMRQRTDKSFPNAYNTAMAVCNSISNPVTKEMLFEFIDRCTAASQGQKRKHHLDPDTELMPPPPPKRPRPLT

SEQ ID NO: 42 - protein, 959 aa, Homo sapiens
MAASTGYVRLWGAARCWVLRRPMLAAAGGRVPTAAGAWLLRGQRTCDASPPWALWGRGPAIGGQWRGFWEASSRGGGAFSGGEDASEGGAEEGAGGAGGSAGAGEGPVITALTPMTIPDVFPHLPLIAITRNPVFPRFIKIIEVKNKKLVELLRRKVRLAQPYVGVFLKRDDSNESDVVESLDEIYHTGTFAQIHEMQDLGDKLRMIVMGHRRVHISRQLEVEPEEPEAENKHKPRRKSKRGKKEAEDELSARHPAELAMEPTPELPAEVLMVEVENVVHEDFQVTEEVKALTAEIVKTIRDIIALNPLYRESVLQMMQAGQRVVDNPIYLSDMGAALTGAESHELQDVLEETNIPKRLYKALSLLKKEFELSKLQQRLGREVEEKIKQTHRKYLLQEQLKIIKKELGLEKDDKDAIEEKFRERLKELVVPKHVMDVVDEELSKLGLLDNHSSEFNVTRNYLDWLTSIPWGKYSNENLDLARAQAVLEEDHYGMEDVKKRILEFIAVSQLRGSTQGKILCFYGPPGVGKTSIARSIARALNREYFRFSVGGMTDVAEIKGHRRTYVGAMPGKIIQCLKKTKTENPLILIDEVDKIGRGYQGDPSSALLELLDPEQNANFLDHYLDVPVDLSKVLFICTANVTDTIPEPLRDRMEMINVSGYVAQEKLAIAERYLVPQARALCGLDESKAKLSSDVLTLLIKQYCRESGVRNLQKQVEKVLRKSAYKIVSGEAESVEVTPENLQDFVGKPVFTVERMYDVTPPGVVMGLAWTAMGGSTLFVETSLRRPQDKDAKGDKDGSLEVTGQLGEVMKESARIAYTFARAFLMQHAPANDYLVTSHIHLHVPEGATPKDGPSAGCTIVTALLSLAMGRPVRQNLAMTGEVSLTGKILPVGGIKEKTIAAKRAGVTCIVLPAENKKDFYDLAAFITEGLEVHFVEHYREIFDIAFPDEQAEALAVER

SEQ ID NO: 43 - protein, 504 aa, Homo sapiens
MVLADLGRKITSALRSLSNATIINEEVLNAMLKEVCTALLEADVNIKLVKQLRENVKSAIDLEEMASGLNKRKMIQHAVFKELVKLVDPGVKAWTPTKGKQNVIMFVGLQGSGKTTTCSKLAYYYQRKGWKTCLICADTFRAGAFDQLKQNATKARIPFYGSYTEMDPVIIASEGVEKFKNENFEIIIVDTSGRHKQEDSLFEEMLQVANAIQPDNIVYVMDASIGQACEAQAKAFKDKVDVASVIVTKLDGHAKGGGALSAVAATKSPIIFIGTGEHIDDFEPFKTQPFISKLLGMGDIEGLIDKVNELKLDDNEALIEKLKHGQFTLRDMYEQFQNIMKMGPFSQILGMIPGFGTDFMSKGNEQESMARLKKLMTIMDSMNDQELDSTDGAKVFSKQPGRIQRVARGSGVSTRDVQELLTQYTKFAQMVKKMGGIKGLFKGGDMSKNVSQSQMAKLNQQMAKMMDPRVLHHMGGMAGLQSMMRQFQQGAAGNMKGMMGFNNM

SEQ ID NO: 44 - protein, 355 aa, Homo sapiens
MAFSGSQAPYLSPAVPFSGTIQGGLQDGLQITVNGTVLSSSGTRFAVNFQTGFSGNDIAFHFNPRFEDGGYVVCNTRQNGSWGPEERKTHMPFQKGMPFDLCFLVQSSDFKVMVNGILFVQYFHRVPFHRVDTISVNGSVQLSYISFQNPRTVPVQPAFSTVPFSQPVCFPPRPRGRRQKPPGVWPANPAPITQTVIHTVQSAPGQMFSTPAIPPMMYPHPAYPMPFITTILGGLYPSKSILLSGTVLPSAQRFHINLCSGNHIAFHLNPRFDENAVVRNTQIDNSWGSEERSLPRKMPFVRGQSFSVWILCEAHCLKVAVDGQHLFEYYHRLRNLPTINRLEVGGDIQLTHVQT

SEQ ID NO: 45 - protein, 452 aa, Homo sapiens
MDDIFTQCREGNAVAVRLWLDNTENDLNQGDDHGFSPLHWACREGRSAVVEMLIMRGARINVMNRGDDTPLHLAASHGHRDIVQKLLQYKADINAVNEHGNVPLHYACFWGQDQVAEDLVANGALVSICNKYGEMPVDKAKAPLRELLRERAEKMGQNLNRIPYKDTFWKGTTRTRPRNGTLNKHSGIDFKQLNFLTKLNENHSGELWKGRWQGNDIVVKVLKVRDWSTRKSRDFNEECPRLRIFSHPNVLPVLGACQSPPAPHPTLITHWMPYGSLYNVLHEGTNFVVDQSQAVKFALDMARGMAFLHTLEPLIPRHALNSRSVMIDEDMTARISMADVKFSFQCPGRMYAPAWVAPEALQKKPEDTNRRSADMWSFAVLLWELVTREVPFADLSNMEIGMKVALEGLRPTIPPGISPHVCKLMKICMNEDPAKRPKFDMIVPILEKMQDK

SEQ ID NO: 46 - protein, 1512 aa, Homo sapiens
MATLSLTVNSGDPPLGALLAVEHVKDDVSISVEEGKENILHVSENVIFTDVNSILRYLARVATTAGLYGSNLMEHTEIDHWLEFSATKLSSCDSFTSTINELNHCLSLRTYLVGNSLSLADLCVWATLKGNAAWQEQLKQKKAPVHVKRWFGFLEAQQAFQSVGTKWDVSTTKARVAPEKKQDVGKFVELPGAEMGKVTVRFPPEASGYLHIGHAKAALLNQHYQVNFKGKLIMRFDDTNPEKEKEDFEKVILEDVAMLHIKPDQFTYTSDHFETIMKYAEKLIQEGKAYVDDTPAEQMKAEREQRIESKHRKNPIEKNLQMWEEMKKGSQFGHSCCLRAKIDMSSNNGCMRDPTLYRCKIQPHPRTGNKYNVYPTYDFACPIVDSIEGVTHALRTTEYHDRDEQFYWIIEALGIRKPYIWEYSRLNLNNTVLSKRKLTWFVNEGLVDGWDDPRFPTVRGVLRRGMTVEGLKQFIAAQGSSRSVVNMEWDKIWAFNKKVIDPVAPRYVALLKKEVIPVNVPEAQEEMKEVAKHPKNPEVGLKPVWYSPKVFIEGADAETFSEGEMVTFINWGNLNITKIHKNADGKIISLDAKFNLENKDYKKTTKVTWLAETTHALPIPVICVTYEHLITKPVLGKDEDFKQYVNKNSKHEELMLGDPCLKDLKKGDIIQLQRRGFFICDQPYEPVSPYSCKEAPCVLIYIPDGHTKEMPTSGSKEKTKVEATKNETSAPFKERPTPSLNNNCTTSEDSLVLYNRVAVQGDVVRELKAKKAPKEDVDAAVKQLLSLKAEYKEKTGQEYKPGNPPAEIGQNISSNSSASILESKSLYDEVAAQGEVVRKLKAEKSPKAKINEAVECLLSLKAQYKEKTGKEYIPGQPPLSQSSDSSPTRNSEPAGLETPEAKVLFDKVASQGEVVRKLKTEKAPKDQVDIAVQELLQLKAQYKSLIGVEYKPVSATGAEDKDKKKKEKENKSEKQNKPQKQNDGQRKDPSKNQGGGLSSSGAGEGQGPKKQTRLGLEAKKEENLADWYSQVITKSEMIEYHDISGCYILRPWAYAIWEAIKDFFDAEIKKLGVENCYFPMFVSQSALEKEKTHVADFAPEVAWVTRSGKTELAEPIAIRPTSETVMYPAYAKWVQSHRDLPIKLNQWCNVVRWEFKHPQPFLRTREFLWQEGHSAFATMEEAAEEVLQILDLYAQVYEELLAIPVVKGRKTEKEKFAGGDYTTTIEAFISASGRAIQGGTSHHLGQNFSKMFEIVFEDPKIPGEKQFAYQNSWGLTTRTIGVMTMVHGDNMGLVLPPRVACVQVVIIPCGITNALSEEDKEALIAKCNDYRRRLLSVNIRVRADLRDNYSPGWKFNHWELKGVPIRLEVGPRDMKSCQFVAVRRDTGEKLTVAENEAETKLQAILEDIQVTLFTRASEDLKTHMVVANTMEDFQKILDSGKIVQIPFCGEIDCEDWIKKTTARDQDLEPGAPSMGAKSLCIPFKPLCELQPGAKCVCGKNPAKYYTLFGRSY

SEQ ID NO: 47 - protein, 478 aa, Homo sapiens
MGRKKKKQLKPWCWYCNRDFDDEKILIQHQKAKHFKCHICHKKLYTGPGLAIHCMQVHKETIDAVPNAIPGRTDIELEIYGMEGIPEKDMDERRRLLEQKTQESQKKKQQDDSDEYDDDDSAASTSFQPQPVQPQQGYIPPMAQPGLPPVPGAPGMPPGIPPLMPGVPPLMPGMPPVMPGMPPGMMPMGGMMPPGPGIPPLMPGMPPGMPPPVPRPGIPPMTQAQAVSAPGILNRPPAPTATVPAPQPPVTKPLFPSAGQMGTPVTSSSTASSNSESLSASSKALFPSTAQAQAAVQGPVGTDFKPLNSTPATTTEPPKPTFPAYTQSTASTTSTTNSTAAKPAASITSKPATLTTTSATSKLIHPDEDISLEERRAQLPKYQRNLPRPGQAPIGNPPVGPIGGMMPPQPGIPQQQGMRPPMPPHGQYGGHHQGMPGYLPGAMPPYGQGPPMVPPYQGGPPRPPMGMRPPVMSQGGRY

SEQ ID NO: 48 - protein, 289 aa, Homo sapiens
MSGFSTEERAAPFSLEYRVFLKNEKGQYISPFHDIPIYADKDVFHMVVEVPRWSNAKMEIATKDPLNPIKQDVKKGKLRYVANLFPYKGYIWNYGAIPQTWEDPGHNDKHTGCCGDNDPIDVCEIGSKVCARGEIIGVKVLGILAMIDEGETDWKVIAINVDDPDAANYNDINDVKRLKPGYLEATVDWFRRYKVPDGKPENEFAFNAEFKDKDFAIDIIKSTHDHWKALVTKKTNGKGISCMNTTLSESPFKCDPDAARAIVDALPPPCESACTVPTDVDKWFHHQKN

SEQ ID NO: 49 - protein, 309 aa, Homo sapiens
MSSTQFNKGPSYGLSAEVKNRLLSKYDPQKEAELRTWIEGLTGLSIGPDFQKGLKDGTILCTLMNKLQPGSVPKINRSMQNWHQLENLSNFIKAMVSYGMNPVDLFEANDLFESGNMTQVQVSLLALAGKAKTKGLQSGVDIGVKYSEKQERNFDDATMKAGQCVIGLQMGTNKCASQSGMTAYGTRRHLYDPKNHILPPMDHSTISLQMGTNKCASQVGMTAPGTRRHIYDTKLGTDKCDNSSMSLQMGYTQGANQSGQVFGLGRQIYDPKYCPQGTVADGAPSGTGDCPDPGEVPEYPPYYQEEAGY

SEQ ID NO: 50 - protein, 354 aa, Homo sapiens
MTAVNVALIRDTKWLTLEVCREFQRGTCSRADADCKFAHPPRVCHVENGRVVACFDSLKGRCTRENCKYLHPPPHLKTQLEINGRNNLIQQKTAAAMFAQQMQLMLQNAQMSSLGSFPMTPSIPANPPMAFNPYIPHPGMGLVPAELVPNTPVLIPGNPPLAMPGAVGPKLMRSDKLEVCREFQRGNCTRGENDCRYAHPTDASMIEASDNTVTICMDYIKGRCSREKCKYFHPPAHLQARLKAAHHQMNHSAASAMALQPGTLQLIPKRSALEKPNGATPVFNPTVFHCQQALTNLQLPQPAFIPAGPILCMAPASNIVPMMHGATPTTVSAATTPATSVPFAAPTTGNQLKF

SEQ ID NO: 51 - protein, 255 aa, Homo sapiens
MQPLLLLLAFLLPTGAEAGEIIGGRESRPHSRPYMAYLQIQSPAGQSRCGGFLVREDFVLTAAHCWGSNINVTLGAHNIQRRENTQQHITARRAIRHPQYNQRTIQNDIMLLQLSRRVRRNRNVNPVALPRAQEGLRPGTLCTVAGWGRVSMRRGTDTLREVQLRVQRDRQCLRIFGSYDPRRQICVGDRRERKAAFKGDSGGPLLCNNVAHGIVSYGKSSGVPPEVFTRVSSFLPWIRTTMRSFKLLDQMETPL

SEQ ID NO: 52 - protein, 504 aa, Homo sapiens
MSVEMDSSSFIQFDVPEYSSTVLSQLNELRLQGKLCDIIVHIQGQPFRAHKAVLAASSPYFRDHSALSTMSGLSISVIKNPNVFEQLLSFCYTGRMSLQLKDVVSFLTAASFLQMQCVIDKCTQILESIHSKISVGDVDSVTVGAEENPESRNGVKDSSFFANPVEISPPYCSQGRQPTASSDLRMETTPSKALRSRLQEEGHSDRGSSGSVSEYEIQIEGDHEQGDLLVRESQITEVKVKMEKSDRPSCSDSSSLGDDGYHTEMVDGEQVVAVNVGSYGSVLQHAYSYSQAASQPTNVSEAFGSLSNSSPSRSMLSCFRGGRARQKRALSVHLHSDLQGLVQGSDSEAMMNNPGYESSPRERSARGHWYPYNERLICIYCGKSFNQKGSLDRHMRLHMGITPFVCKFCGKKYTRKDQLEYHIRGHTDDKPFRCEICGKCFPFQGTLNQHLRKNHPGVAEVRSRIESPERTDVYVEQKLENDASASEMGLDSRMEIHTVSDAPD

SEQ ID NO: 53 - protein, 180 aa, Homo sapiens
MADSELQLVEQRIRSFPDFPTPGVVFRDISPVLKDPASFRAAIGLLARHLKATHGGRIDYIAGLDSRGFLFGPSLAQELGLGCVLIRKRGKLPGPTLWASYSLEYGKAELEIQKDALEPGQRVVVVDDLLATGGTMNAACELLGRLQAEVLECVSLVELTSLKGREKLAPVPFFSLLQYE

SEQ ID NO: 54 - protein, 194 aa, Homo sapiens [sequence omitted]

SEQ ID NO: 55 - protein, 2541 aa, Homo sapiens
MVALSLKISIGNVVKTMQFEPSTMVYDACRIIRERIPEAPAGPPSDFGLFLSDDDPKKGIWLEAGKALDYYMLRNGDTMEYRKKQRPLKIRMLDGTVKTIMVDDSKTVTDMLMTICARIGITNHDEYSLVRELMEEKKEEITGTLRKDKTLLRDEKKMEKLKQKLHTDDELNWLDHGRTLREQGVEEHETLLLRRKFFYSDQNVDSRDPVQLNLLYVQARDDILNGSHPVSFDKACEFAGFQCQIQFGPHNEQKHKAGFLDLKDFLPKEYVKQKGERKIFQAHKNCGQMSEIEAKVRYVKLARSLKTYGVSFFLVKEKMKGKNKLVPRLLGITKECVMRVDEKTKEVIQEWNLTNIKRWAASPKSFTLDFGDYQDGYYSVQTTEGEQIAQLIAGYIDIILKKKKSKDHFGLEGDEESTMLEDSVSPKKSTVLQQQYNRVGKVEHGSVALPAIMRSGASGPENFQVGSMPPAQQQITSGQMHRGHMPPLTSAQQALTGTINSSMQAVQAAQATLDDFDTLPPLGQDAASKAWRKNKMDESKHEIHSQVDAITAGTASVVNLTAGDPAETDYTAVGCAVTTISSNLTEMSRGVKLLAALLEDEGGSGRPLLQAAKGLAGAVSELLRSAQPASAEPRQNLLQAAGNVGQASGELLQQIGESDTDPHFQDALMQLAKAVASAAAALVLKAKSVAQRTEDSGLQTQVIAAATQCALSTSQLVACTKVVAPTISSPVCQEQLVEAGRLVAKAVEGCVSASQAATEDGQLLRGVGAAATAVTQALNELLQHVKAHATGAGPAGRYDQATDTILTVTENIFSSMGDAGEMVRQARILAQATSDLVNAIKADAEGESDLENSRKLLSAAKILADATAKMVEAAKGAAAHPDSEEQQQRLREAAEGLRMATNAAAQNAIKKKLVQRLEHAAKQAAASATQTIAAAQHAASTPKASAGPQPLLVQSCKAVAEQIPLLVQGVRGSQAQPDSPSAQLALIAASQSFLQPGGKMVAAAKASVPTIQDQASAMQLSQCAKNLGTALAELRTAAQKAQEACGPLEMDSALSVVQNLEKDLQEVKAAARDGKLKPLPGETMEKCTQDLGNSTKAVSSAIAQLLGEVAQGNENYAGIAARDVAGGLRSLAQAARGVAALTSDPAVQAIVLDTASDVLDKASSLIEEAKKAAGHPGDPESQQRLAQVAKAVTQALNRCVSCLPGQRDVDNALRAVGDASKRLLSDSLPPSTGTFQEAQSRLNEAAAGLNQAATELVQASRGTPQDLARASGRFGQDFSTFLEAGVEMAGQAPSQEDRAQVVSNLKGISMSSSKLLLAAKALSTDPAAPNLKSQLAAAARAVTDSINQLITMCTQQAPGQKECDNALRELETVRELLENPVQPINDMSYFGCLDSVMENSKVLGEAMTGISQNAKNGNLPEFGDAISTASKALCGFTEAAAQAAYLVGVSDPNSQAGQQGLVEPTQFARANQAIQMACQSLGEPGCTQAQVLSAATIVAKHTSALCNSCRLASARTTNPTAKRQFVQSAKEVANSTANLVKTIKALDGAFTEENRAQCRAATAPLLEAVDNLSAFASNPEFSSIPAQISPEGRAAMEPIVISAKTMLESAGGLIQTARALAVNPRDPPSWSVLAGHSRTVSDSIKKLITSMRDKAPGQLECETAIAALNSCLRDLDQASLAAVSQQLAPREGISQEALHTQMLTAVQEISHLIEPLANAARAEASQLGHKVSQMAQYFEPLTLAAVGAASKTLSHPQQMALLDQTKTLAESALQLLYTAKEAGGNPKQAAHTQEALEEAVQMMTEAVEDLTTTLNEAASAAGVVGGMVDSITQAINQLDEGPMGEPEGSFVDYQTTMVRTAKAIAVTVQEMVTKSNTSPEELGPLANQLTSDYGRLASEAKPAAVAAENEEIGSHIKHRVQELGHGCAALVTKAGALQCSPSDAYTKKELIECARRVSEKVSHVLAALQAGNRGTQACITAASAVSGIIADLDTTIMFATAGTLNREGTETFADHREGILKTAKVLVEDTKVLVQNAAGSQEKLAQAAQSSVATITRLADVVKLGAASLGAEDPETQVVLINAVKDVAKALGDLISATKAAAGKVGDDPAVWQLKNSAKVMVTNVTSLLKTVKAVEDEATKGTRALEATTEHIRQELAVFCSPEPPAKTSTPEDFIRMTKGITMATAKAVAAGNSCRQEDVIATANLSRRAIADMLRACKEAAYHPEVAPDVRLRALHYGRECANGYLELLDHVLLTLQKPSPELKQQLTGHSKRVAGSVTELIQAAEAMKGTEWVDPEDPTVIAENELLGAAAAIEAAAKKLEQLKPRAKPKEADESLNFEEQILEAAKSIAAATSALVKAASAAQRELVAQGKVGAIPANALDDGQWSQGLISAARMVAAATNNLCEAANAAVQGHASQEKLISSAKQVAASTAQLLVACKVKADQDSEAMKRLQAAGNAVKRASDNLVKAAQKAAAFEEQENETVVVKEKMVGGIAQIIAAQEEMLRKERELEEARKKLAQIRQQQYKFLPSELRDEH

SEQ ID NO: 56 - protein, 307 aa, Homo sapiens
MTKAGSKGGNLRDKLDGNELDLSLSDLNEVPVKELAALPKATILDLSCNKLTTLPSDFCGLTHLVKLDLSKNKLQQLPADFGRLVNLQHLDLLNNKLVTLPVSFAQLKNLKWLDLKDNPLDPVLAKVAGDCLDEKQCKQCANKVLQHMKAVQADQERERQRRLEVEREAEKKREAKQRAKEAQERELRKREKAEEKERRRKEYDALKAAKREQEKKPKKEANQAPKSKSGSRPRKPPPRKHTRSWAVLKLLLLLLLFGVAGGLVACRVTELQQQPLCTSVNTIYDNAVQGLRRHEILQWVLQTDSQQ

SEQ ID NO: 57 - protein, 553 aa, Homo sapiens
MLSVRVAAAVVRALPRRAGLVSRNALGSSFIAARNFHASNTHLQKTGTAEMSSILEERILGADTSVDLEETGRVLSIGDGIARVHGLRNVQAEEMVEFSSGLKGMSLNLEPDNVGVVVFGNDKLIKEGDIVKRTGAIVDVPVGEELLGRVVDALGNAIDGKGPIGSKTRRRVGLKAPGIIPRISVREPMQTGIKAVDSLVPIGRGQRELIIGDRQTGKTSIAIDTIINQKRFNDGSDEKKKLYCIYVAIGQKRSTVAQLVKRLTDADAMKYTIVVSATASDAAPLQYLAPYSGCSMGEYFRDNGKHALIIYDDLSKQAVAYRQMSLLLRRPPGREAYPGDVFYLHSRLLERAAKMNDAFGGGSLTALPVIETQAGDVSAYIPTNVISITDGQIFLETELFYKGIRPAINVGLSVSRVGSAAQTRAMKQVAGTMKLELAQYREVAAFAQFGSDLDAATQQLLSRGVRLTELLKQGQYSPMAIEEQVAVIYAGVRGYLDKLEPSKITKFENAFLSHVVSQHQALLGTIRADGKISEQSDAKLKEIVTNFLAGFEA

SEQ ID NO: 58 - protein, 1220 aa, Homo sapiens
MKLKEVDRTAMQAWSPAQNHPIYLATGTSAQQLDATFSTNASLEIFELDLSDPSLDMKSCATFSSSHRYHKLIWGPYKMDSKGDVSGVLIAGGENGNIILYDPSKIIAGDKEVVIAQNDKHTGPVRALDVNIFQTNLVASGANESEIYIWDLNNFATPMTPGAKTQPPEDISCIAWNRQVQHILASASPSGRATVWDLRKNEPIIKVSDHSNRMHCSGLAWHPDVATQMVLASEDDRLPVIQMWDLRFASSPLRVLENHARGILAIAWSMADPELLLSCGKDAKILCSNPNTGEVLYELPTNTQWCFDIQWCPRNPAVLSAASFDGRISVYSIMGGSTDGLRQKQVDKLSSSFGNLDPFGTGQPLPPLQIPQQTAQHSIVLPLKKPPKWIRRPVGASFSFGGKLVTFENVRMPSHQGAEQQQQQHHVFISQVVTEKEFLSRSDQLQQAVQSQGFINYCQKKIDASQTEFEKNVWSFLKVNFEDDSRGKYLELLGYRKEDLGKKIALALNKVDGANVALKDSDQVAQSDGEESPAAEEQLLGEHIKEEKEESEFLPSSGGTFNISVSGDIDGLITQALLTGNFESAVDLCLHDNRMADAIILAIAGGQELLARTQKKYFAKSQSKITRLITAVVMKNWKEIVESCDLKNWREALAAVLTYAKPDEFSALCDLLGTRLENEGDSLLQTQACLCYICAGNVEKLVACWTKAQDGSHPLSLQDLIEKVVILRKAVQLTQAMDTSTVGVLLAAKMSQYANLLAAQGSIAAALAFLPDNTNQPNIMQLRDRLCRAQGEPVAGHESPKIPYEKQQLPKGRPGPVAGHHQMPRVQTQQYYPHGENPPPPGFIMHGNVNPNAAGQLPTSPGHMHTQVPPYPQPQPYQPAQPYPFGTGGSAMYRPQQPVAPPTSNAYPNTPYISSASSYTGQSQLYAAQHQASSPTSSPATSFPPPPSSGASFQHGGPGAPPSSSAYALPPGTTGTLPAASELPASQRTGPQNGWNDPPALNRVPKKKKMPENFMPPVPITSPIMNPLGDPQSQMLQQQPSAPVPLSSQSSFPQPHLPGGQPFHGVQQPLGQTGMPPSFSKPNIEGAPGAPIGNTFQHVQSLPTKKITKKPIPDEHLILKTTFEDLIQRCLSSATDPQTKRKLDDASKRLEFLYDKLREQTLSPTITSGLHNIARSIETRNYSEGLTMHTHIVSTSNFSETSAFMPVLKVVLTQANKLGV

SEQ ID NO: 59 - protein, 575 aa, Homo sapiens
MTSKKLVNSVAGCADDALAGLVACNPNLQLLQGHRVALRSDLDSLKGRVALLSGGGSGHEPAHAGFIGKGMLTGVIAGAVFTSPAVGSILAAIRAVAQAGTVGTLLIVKNYTGDRLNFGLAREQARAEGIPVEMVVIGDDSAFTVLKKAGRRGLCGTVLIHKVAGALAEAGVGLEEIAKQVNVVTKAMGTLGVSLSSCSVPGSKPTFELSADEVELGLGIHGEAGVRRIKMATADEIVKLMLDHMTNTTNASHVPVQPGSSVVMMVNNLGGLSFLELGIIADATVRSLEGRGVKIARALVGTFMSALEMPGISLTLLLVDEPLLKLIDAETTAAAWPNVAAVSITGRKRSRVAPAEPQEAPDSTAAGGSASKRMALVLERVCSTLLGLEEHLNALDRAAGDGDCGTTHSRAARAIQEWLKEGPPPASPAQLLSKLSVLLLEKMGGSSGALYGLFLTAAAQPLKAKTSLPAWSAAMDAGLEAMQKYGKAAPGDRTMLDSLWAAGQELQAWKSPGADLLQVLTKAVKSAEAAAEATKNMEAGAGRASYISSARLEQPDPGAVAAAAILRAILEVLQS

SEQ ID NO: 60 - protein, 226 aa, Homo sapiens
MASNVTNKTDPRSMNSRVFIGNLNTLVVKKSDVEAIFSKYGKIVGCSVHKGFAFFQYVNERNARAAVAGEDGRMIAGQVLDINLAAEPKVNRGKAGVKRSAAEMYGSSFDLDCDFQRDYYDRMYSYPARVPPPPPIARAAIKRELTQIKQKVDSFLENLEKIEKEQSKQAVEMNNVKSEEEQSSSSVKKDETNVKMESEGGADDSAEEGDLLDDDDNEDGGMTSWS

SEQ ID NO: 61 - protein, 159 aa, Homo sapiens
MARSRTSSSPAISQETEVGGGRKAIIIFVPVPQLKSFQKIQVRLVRELEKKFSGKHVVFIAQRRILPKPTQKSRTKNKQKCPRSRTLTAVHDAFLEDLVFPSEIVGKRIPVKLDSSRLIKVHLDKAQQNNVEHKVETFSGVYKKLTGKDVNFEFPEFQL

SEQ ID NO: 62 - protein, 113 aa, Homo sapiens
DIVMTQSPLSLPVTPGEPASISCRSSQSLLHSNGFNYLHWYLQKPGQSPRLLIYLGSNRASGVPDRFSGSGSGTDFTLKISRVEADDVGIYYCMQALQSPYTFGQGTKLEIKR

SEQ ID NO: 63 - protein, 355 aa, Homo sapiens
MSEEQFGGDGAAAAATAAVGGSAGEQEGAMVAATQGAAAAAGSGAGTGGGTASGGTEGGSAESEGAKIDASKNEEDEGHSNSSPRHSEAATAQREEWKMFIGGLSWDTTKKDLKDYFSKFGEVVDCTLKLDPITGRSRGFGFVLFKESESVDKVMDQKEHKLNGKVIDPKRAKAMKTKEPVKKIFVGGLSPDTPEEKIREYFGGFGEVESIELPMDNKTNKRRGFCFITFKEEEPVKKIMEKKYHNVGLSKCEIKVAMSKEQYQQQQQWGSRGGFAGRARGRGGGPSQNWNQGYSNYWNQGYGNYGYNSQGYGGYGGYDYTGYNNYYGYGDYSNQQSGYGKVSRRGGHQNSYKPY

SEQ ID NO: 64 - protein, 454 aa, Homo sapiens
MNNSGADEIGKLFVGGLDWSTTQETLRSYFSQYGEVVDCVIMKDKTTNQSRGFGFVKFKDPNCVGTVLASRPHTLDGRNIDPKPCTPRGMQPERTRPKEGWQKGPRSDNSKSNKIFVGGIPHNCGETELREYFKKFGVVTEVVMIYDAEKQRPRGNGYVSARASPGLLPVANGNSLNKVIPAKSPPPPTHSTQLGAPSRKPDLRVITSQAGKGLMHHLTEDHLDLNNAQRLGVSQSTHSLTTPVVSVATPSLLSQGLPFSSMPTAYNTDYQLTSAELSSLPAFSSPGGLSLGNVTAWQQPQQPQQPQQPQPPQQQPPQPQQPQPQQPQQPQQPPQQQSHLVPVSLSNLIPGSPLPHVGAALTVTTHPHISIKSEPVSPSRERSPAPPPPAVFPAARPEPGDGLSSPAGGSYETGDRDDGRGDFGPTLGLLRPAPEPEAEGSAVKRMRLDTWTLK

SEQ ID NO: 65 - protein, 1075 aa, Homo sapiens
MVVEVDSMPAASSVKKPFGLRSKMGKWCCRCFPCYRESGKSNVGTSGDHDDSAMKTLRSKMGKWCHHCFPCCRGSGKSNVGASGDHDDSAMKTLRNKMGKWCCHCFPCCRGSGKSKVGAWGDYDDSAFMEPRYHVRGEDLDKLHRAAWWGKVPRKDLIVMLRDTDVNKKDKQKRTALHLASANGNSEVVKLLLDRRCQLNVLDNKKRTALIKAVQCQEDECALMLLEHGTDPNIPDEYGNTTLHYAIYNEDKLMAKALLLYGADIESKNKHGLTPLLLGVHEQKQQVVKFLIKKKANLNALDRYGRTALILAVCCGSASIVSLLLEQNIDVSSQDLSGQTAREYAVSSHHHVICQLLSDYKEKQMLKISSENSNPEQELKLTSEEESQRFKGSENSQPEKMSQELEINKDGDREVEEEMKKHESNNVGLLENLTNGVTAGNGDNGLIPQRKSRTPENQQFPDNESEEYHRICELLSDYKEKQMPKYSSENSNPEQDLKLTSEEESQRLKGSENGQPEKRSQEPEINKDGDRELENFMAIEEMKKHGSTHVGFPENLTNGATAGNGDDGLIPPRKSRTPESQQFPDTENEEYHSDEQNDTQKQFCEEQNTGILHDEILIHEEKQIEVVEKMNSELSLSCKKEKDVLHENSTLREEIAMLRLELDTMKHQSQLREKKYLEDIESVKKKNDNLLKALQLNELTMDDDTAVLVIDNGSGMCKAGFAGDDAPRAVFPSIVGRPRQQGMMGGMHQKESYVGKEAQSKRGILTLKYPMEHGIITNWDDMEKIWHHTFYNELRVAPEEHPILLTEAPLNPKANREKMTQIMFETFNTPAMYVAIQAVPSLYTSGRTTGIVMDSGDGVTHTVPIYEGNALPHATLRLDLAGRELPDYLMKILTERGYRFTTMAEREIVRDIKEKLCYVALDFEQEMATAASSSSLEKSYELPDGQVITIGNERFRCPEALFQPCFLGMESCGIHETTFNSIMKSDVDIRKDLYTNTVLSGGTTMYPGMAHRMQKEIAALAPSMMKIRIIAPPKRKYSVWVGGSILASLSTFQQMWISKQEYDESGPSIVHRKCF

SEQ ID NO: 66 - protein, 430 aa, Homo sapiens
MSFTTRSTFSTNYRSLGSVQAPSYGARPVSSAASVYAGAGGSGSRISVSRSTSFRGGMGSGGLATGIAGGLAGMGGIQNEKETMQSLNDRLASYLDRVRSLETENRRLESKIREHLEKKGPQVRDWSHYFKIIEDLRAQIFANTVDNARIVLQIDNARLAADDFRVKYETELAMRQSVENDIHGLRKVIDDTNITRLQLETEIEALKEELLFMKKNHEEEVKGLQAQIASSGLTVEVDAPKSQDLAKIMADIRAQYDELARKNREELDKYWSQQIEESTTVVTTQSAEVGAAETTLTELRRTVQSLEIDLDSMRNLKASLENSLREVEARYALQMEQLNGILLHLESELAQTRAEGQRQAQEYEALLNIKVKLEAEIATYRRLLEDGEDFNLGDALDSSNSMQTIQKTTTRRIVDGKVVSETNDTKVLRH

SEQ ID NO: 67 - protein, 1843 aa, Homo sapiens
MEPAERAGVGEPPEPGGRPEPGPRGFVPQKEIVYNKLLPYAERLDAESDLQLAQIKCNLGRAVQLQELWPGGLFWTRKLSTYIRLYGRKFSKEDHVLFIKLLYELVSIPKLEISMMQGFARLLINLLKKKELLSRADLELPWRPLYDMVERILYSKTEHLGLNWFPNSVENILKTLVKSCRPYFPADATAEMLEEWRPLMCPFDVTMQKAITYFEIFLPTSLPPELHHKGFKLWFDELIGLWVSVQNLPQWEGQLVNLFARLATDNIGYIDWDPYVPKIFTRILRSLNLPVGSSQVLVPRFLTNAYDIGHAVIWITAMMGGPSKLVQKHLAGLFNSITSFYHPSNNGRWLNKLMKLLQRLPNSVVRRLHRERYKKPSWLTPVPDSHKLTDQDVTDFVQCIIQPVLLAMFSKTGSLEAAQALQNLALMRPELVIPPVLERTYPALETLTEPHQLTATLSCVIGVARSLVSGGRWFPEGPTHMLPLLMRALPGVDPNDFSKCMITFQFIATFSTLVPLVDCSSVLQERNDLTEVERELCSATAEFEDFVLQFMDRCFGLIESSTLEQTREETETEKMTHLESLVELGLSSTFSTILTQCSKEIFMVALQKVFNFSTSHIFETRVAGRMVADMCRAAVKCCPEESLKLFVPHCCSVITQLTMNDDVLNDEELDKELLWNLQLLSEITRVDGRKLLLYREQLVKILQRTLHLTCKQGYTLSCNLLHHLLRSTTLIYPTEYCSVPGGFDKPPSEYFPIKDWGKPGDLWNLGIQWHVPSSEEVSFAFYLLDSFLQPELVKLQHCGDGKLEMSRDDILQSLTIVHNCLIGSGNLLPPLKGEPVTNLVPSMVSLEETKLYTGLEYDLSRENHREVIATVIRKLLNHILDNSEDDTKSLFLIIKIIGDLLQFQGSHKHEFDSRWKSFNLVKKSMENRLHGKKQHIRALLIDRVMLQHELRTLTVEGCEYKKIHQDMIRDLLRLSTSSYSQVRNKAQQTFFAALGAYNFCCRDIIPLVLEFLRPDRQGVTQQQFKGALYCLLGNHSGVCLANLHDWDCIVQTWPAIVSSGLSQAMSLEKPSIVRLFDDLAEKIHRQYETIGLDFTIPKSCVEIAELLQQSKNPSINQILLSPEKIKEGIKRQQEKNADALRNYENLVDTLLDGVEQRNLPWKFEHIGIGLLSLLLRDDRVLPLRAIRFFVENLNHDAIVVRKMAISAVAGILKQLKRTHKKLTINPCEISGCPKPTQIIAGDRPDNHWLHYDSKTIPRTKKEWESSCFVEKTHWGYYTWPKNMVVYAGVEEQPKLGRSREDMTEAEQIIFDHFSDPKFVEQLITFLSLEDRKGKDKFNPRRFCLFKGIFRNFDDAFLPVLKPHLEHLVADSHESTQRCVAEIIAGLIRGSKHWTFEKVEKLWELLCPLLRTALSNITVETYNDWGACIATSCESRDPRKLHWLFELLLESPLSGEGGSFVDACRLYVLQGGLAQQEWRVPELLHRLLKYLEPKLTQVYKNVRERIGSVLTYIFMIDVSLPNTTPTISPHVPEFTARILEKLKPLMDVDEEIQNHVMEENGIGEEDERTQGIKLLKTILKWLMASAGRSFSTAVTEQLQLLPLFFKIAPVENDNSYDELKRDAKLCLSLMSQGLLYPHQVPLVLQVLKQTARSSSWHARYTVLTYLQTMVFYNLFIFLNNEDAVKDIRWLVISLLEDEQLEVREMAATTLSGLLQCNFLTMDSPMQIHFEQLCKTKLPKKRKRDPGSVGDTIPSAELVKRHAGVLGLGACVLSSPYDVPTWMPQLLMNLSAHLNDPQPIEMTVKKTLSNFRRTHHDNWQEHKQQFTDDQLLVLTDLLVSPCYYA

SEQ ID NO: 68 - protein, 382 aa, Homo sapiens
MDGETAEEQGGPVPPPVAPGGPGLGGAPGGRREPKKYAVTDDYQLSKQVLGLGVNGKVLECFHRRTGQKCALKLLYDSPKARQEVDHHWQASGGPHIVCILDVYENMHHGKRCLLIIMECMEGGELFSRIQERGDQAFTEREAAEIMRDIGTAIQFLHSHNIAHRDVKPENLLYTSKEKDAVLKLTDFGFAKETTQNALQTPCYTPYYVAPEVLGPEKYDKSCDMWSLGVIMYILLCGFPPFYSNTGQAISPGMKRRIRLGQYGFPNPEWSEVSEDAKQLIRLLLKTDPTERLTITQFMNHPWINQSMVVPQTPLHTARVLQEDKDHWDEVKEEMTSALATMRVDYDQVKIKDLKTSNNRLLNKRRKKQAGSSSASQGCNNQ

SEQ ID NO: 69 - protein, 688 aa, Homo sapiens
MWCIVLFSLLAWVYAEPTMYGEILSPNYPQAYPSEVEKSWDIEVPEGYGIHLYFTHLDIELSENCAYDSVQIISGDTEEGRLCGQRSSNNPHSPIVEEFQVPYNKLQVIFKSDFSNEERFTGFAAYYVATDINECTDFVDVPCSHFCNNFIGGYFCSCPPEYFLHDDMKNCGVNCSGDVFTALIGEIASPNYPKPYPENSRCEYQIRLEKGFQVVVTLRREDFDVEAADSAGNCLDSLVFVAGDRQFGPYCGHGFPGPLNIETKSNALDIIFQTDLTGQKKGWKLRYHGDPMPCPKEDTPNSVWEPAKAKYVFRDVVQITCLDGFEVVEGRVGATSFYSTCQSNGKWSNSKLKCQPVDCGIPESIENGKVEDPESTLFGSVIRYTCEEPYYYMENGGGGEYHCAGNGSWVNEVLGPELPKCVPVCGVPREPFEEKQRIIGGSDADIKNFPWQVFFDNPWAGGALINEYWVLTAAHVVEGNREPTMYVGSTSVQTSRLAKSKMLTPEHVFIHPGWKLLEVPEGRTNFDNDIALVRLKDPVKMGPTVSPICLPGTSSDYNLMDGDLGLISGWGRTEKRDRAVRLKAARLPVAPLRKCKEVKVEKPTADAEAYVFTPNMICAGGEKGMDSCKGDSGGAFAVQDPNDKTKFYAAGLVSWGPQCGTYGLYTRVKNYVDWIMKTMQENSTPRED

SEQ ID NO: 70 - protein, 148 aa, Homo sapiens; identical to SEQ ID NO: 24

SEQ ID NO: 71 - protein, 424 aa, Homo sapiens
MDFSRRSFHRSLSSSLQAPVVSTVGMQRLGTTPSVYGGAGGRGIRISNSRHTVNYGSDLTGGGDLFVGNEKMAMQNLNDRLASYLEKVRTLEQSNSKLEVQIKQWYETNAPRAGRDYSAYYRQIEELRSQIKDAQLQNARCVLQIDNAKLAAEDFRLKYETERGIRLTVEADLQGLNKVFDDLTLHKTDLEIQIEELNKDLALLKKEHQEEVDGLHKHLGNTVNVEVDAAPGLNLGVIMNEMRQKYEVMAQKNLQEAKEQFERQTAVLQQQVTVNTEELKGTEVQLTELRRTSQSLEIELQSHLSMKESLEHTLEETKARYSSQLANLQSLLSSLEAQLMQIRSNMERQNNEYHILLDIKTRLEQEIATYRRLLEGEDVKTTEYQLSTLEERDIKKTRKIKTVVQEVVDGKVVSSEVKEVEENI

SEQ ID NO: 72 - protein, 160 aa, Homo sapiens
MVPKLFTSQICLLLLLGLMGVEGSLHARPPQFTRAQWFAIQHISLNPPRCTIAMRAINNYRWRCKNQNTFLRTTFANVVNVCGNQSIRCPHNRTLNNCHRSRFRVPLLHCDLINPGAQNISNCTYADRPGRRFYVVACDNRDPRDSPRYPVVPVHLDTTI

SEQ ID NO: 73 - protein, 517 aa, Homo sapiens [sequence omitted]

SEQ ID NO: 74 - protein, 243 aa, Homo sapiens
MWICPGGGGGGGGGGGGGGGDREDARPAPLCCGRCWRSGCAARPPRMVSIGLRGAVRGARGCHLGRPFSPSVLLCVGRPGSAAGAERGHSLGSREFGHRRGPLPWCPANRRGSPPTAGVPRQPPGFPAAPAPRGPGPLTRLLGRREAGSKSQKLLFRSARVQGGGQFCPSGSAFLGVEREPTAGLGGAERRNARFWRGERGQGRQAKRPAPSQPASPLPGGGTWAGCVGLVWMGTGFCGAPEF

SEQ ID NO: 75 - protein, 703 aa, Homo sapiens
MERAAPSRRVPLPLLLLGGLALLAAGVDADVLLEACCADGHRMATHQKDCSLPYATESKECRMVQEQCCHSQLEELHCATGISLANEQDRCATPHGDNASLEATFVKRCCHCCLLGRAAQAQGQSCEYSLMVGYQCGQVFRACCVKSQETGDLDVGGLQETDKIIEVEEEQEDPYLNDRCRGGGPCKQQCRDTGDEVVCSCFVGYQLLSDGVSCEDVNECITGSHSCRLGESCINTVGSFRCQRDSSCGTGYELTEDNSCKDIDECESGIHNCLPDFICQNTLGSFRCRPKLQCKSGFIQDALGNCIDINECLSISAPCPIGHTCINTEGSYTCQKNVPNCGRGYHLNEEGTRCVDVDECAPPAEPCGKGHRCVNSPGSFRCECKTGYYFDGISRMCVDVNECQRYPGRLCGHKCENTLGSYLCSCSVGFRLSVDGRSCEDINECSSSPCSQECANVYGSYQCYCRRGYQLSDVDGVTCEDIDECALPTGGHICSYRCINIPGSFQCSCPSSGYRLAPNGRNCQDIDECVTGIHNCSINETCFNIQGGFRCLAFECPENYRRSAATLQQEKTDTVRCIKSCRPNDVTCVFDPVHTISHTVISLPTFREFTRPEEIIFLRAITPPHPASQANIIFDITEGNLRDSFDIIKRYMDGMTVGVVRQVRPIVGPFHAVLKLEMNYVVGGVVSHRNVVNVRIFVSEYWF

SEQ ID NO: 76 - protein, 461 aa, Homo sapiens
MPPSGPRGTLLLLPLLLLLLLRAVLAVPLERGAPNKEETPATESPDTGLYYHRYLQEVIDVLETDGHFREKLQAANAEDIKSGKLSRELDFVSHHVRTKLDELKRQEVSRLRMLLKAKMDAEQDPNVQVDHLNLLKQFEHLDPQNQHTFEARDLELLIQTATRDLAQYDAAHHEEFKRYEMLKEHERRRYLESLGEEQRKEAERKLEEQQRRHREHPKVNVPGSQAQLKEVWEELDGLDPNRFNPKTFFILHDINSDGVLDEQELEALFTKELEKVYDPKNEEDDMREMEEERLRMREHVMKNVDTNQDRLVTLEEFLASTQRKEFGDTGEGWETVEMHPAYTEEELRRFEEELAAREAELNAKAQRLSQETEALGRSQGRLEAQKRELQQAVLHMEQRKQQQQQQQGHKAPAAHPEGQLKFHPDTDDVPVPAPAGDQKEVDTSEKKLLERLPEVEVPQHL

SEQ ID NO: 77 - protein, 126 aa, Homo sapiens
MPDPAKSAPAPKKGSKKAVTKVQKKDGKKRKRSRKESYSVYVYKVLKQVHPDTGISSKAMGIMNSFVNDIFERIAGEASRLAHYNKRSTITSREIQTAVRLLLPGELAKHAVSEGTKAVTKYTSSK

SEQ ID NO: 78 - protein, 835 aa, Homo sapiens
MAASAAAASAAAASAASGSPGPGEGSAGGEKRSTAPSAAASASASAAASSPAGGGAEALELLEHCGVCRERLRPEREPRLLPCLHSACSACLGPAAPAAANSSGDGGAAGDGTVVDCPVCKQQCFSKDIVENYFMRDSGSKAATDAQDANQCCTSCEDNAPATSYCVECSEPLCETCVEAHQRVKYTKDHTVRSTGPAKSRDGERTVYCNVHKHEPLVLFCESCDTLTCRDCQLNAHKDHQYQFLEDAVRNQRKLLASLVKRLGDKHATLQKSTKEVRSSIRQVSDVQKRVQVDVKMAILQIMKELNKRGRVLVNDAQKVTEGQQERLERQHWTMTKIQKHQEHILRFASWALESDNNTALLLSKKLIYFQLHRALKMIVDPVEPHGEMKFQWDLNAWTKSAEAFGKIVAERPGTNSTGPAPMAPPRAPGPLSKQGSGSSQPMEVQEGYGFGSGDDPYSSAEPHVSGVKRSRSGEGEVSGLMRKVPRVSLERLDLDLTADSQPPVFKVFPGSTTEDYNLIVIERGAAAAATGQPGTAPAGTPGAPPLAGMAIVKEEETEAAIGAPPTATEGPETKPVLMALAEGPGAEGPRLASPSGSTSSGLEVVAPEGTSAPGGGPGTLDDSATICRVCQKPGDLVMCNQCEFCFHLDCHLPALQDVPGEEWSCSLCHVLPDLKEEDGSLSLDGADSTGVVAKLSPANQRKCERVLLALFCHEPCRPLHQLATDSTFSLDQPGGTLDLTLIRARLQEKLSPPYSSPQEFAQDVGRMFKQFNKLTEDKADVQSIIGLQRFFETRMNEAFGDTKFSAVLVEPPPMSLPGAGLSSQELSGGPGDGP

SEQ ID NO: 79 - protein, 364 aa, Homo sapiens
MNRTAMRASQKDFENSMNQVKLLKKDPGNEVKLKLYALYKQATEGPCNMPKPGVFDLINKAKWDAWNALGSLPKEAARQNYVDLVSSLSPSLESSSQVEPGTDRKSTGFETLVVTSEDGITKIMFNRPKKKNAINTEMYHEIMRALKAASKDDSIITVLTGNGDYYSSGNDLTNFTDIPPGGVEEKAKNNAVLLREFVGCFIDFPKPLIAVVNGPAVGISVTLLGLFDAVYASDRATFHTPFSHLGQSPEGCSSYTFPKIMSPAKATEMLIFGKKLTAGEACAQGLVTEVFPDSTFQKEVWTRLKAFAKLPPNALRISKEVIRKREREKLHAVNAEECNVLQGRWLSDECTNAVVNFLSRKSKL

SEQ ID NO: 80 - protein, 216 aa, Homo sapiens
MLRLSERNMKVLLAAALIAGSVFFLLLPGPSAADEKKKGPKVTVKVYFDLRIGDEDVGRVIFGLFGKTVPKTVDNFVALATGEKGFGYKNSKFHRVIKDFMIQGGDFTRGDGTGGKSIYGERFPDENFKLKHYGPGWVSMANAGKDTNGSQFFITTVKTAWLDGKHVVFGKVLEGMEVVRKVESTKTDSRDKPLKDVIIADCGKIEVEKPFAIAKE

SEQ ID NO: 81 - protein, 160 aa, Homo sapiens [sequence omitted]

SEQ ID NO: 82 - protein, 436 aa, Homo sapiens
AVGTLYTYPENWRAFKALIAAQYSGAQVRVLSAPPHFHFGQTNRTPEFLRKFPAGKVPAFEGDDGFCVFESNAIAYYVSNEELRGSTPEAAAQVVQWVSFADSDIVPPASTWVFPTLGIMHHNKQATENAKEEVRRILGLLDAYLKTRTFLVGERVTLADITVVCTLLWLYKQVLEPSFRQAFPNTNRWFLTCINQPQFRAVLGEVKLCEKMAQFDAKKFAETQPKKDTPRKEKGSREEKQKPQAERKEEKKAAAPAPEEEMDECEQALAAEPKAKDPFAHLPKSTFVLDEFKRKYSNEDTLSVALPYFWEHFDKDGWSLWYSEYRFPEELTQTFMSCNLITGMFQRLDKLRKNAFASVILFGTNNSSSISGVWVFRGQELAFPLSPDWQVDYESYTWRKLDPGSEETQTLVREYFSWEGAFQHVGKAFNQGKIFK

SEQ ID NO: 83 - protein, 483 aa, Homo sapiens
MSIRVTQKSYKVSTSGPRAFSSRSYTSGPGSRISSSSFSRVGSSNFRGGLGGGYGGASGMGGITAVTVNQSLLSPLVLEVDPNIQAVRTQEKEQIKTLNNKFASFIDKVRFLEQQNKMLETKWSLLQQQKTARSNMDNMFESYINNLRRQLETLGQEKLKLEAELGNMQGLVEDFKNKYEDEINKRTEMENEFVLIKKDVDEAYMNKVELESRLEGLTDEINFLRQLYEEEIRELQSQISDTSVVLSMDNSRSLDMDSIIAEVKAQYEDIANRSRAEAESMYQIKYEELQSLAGKHGDDLRRTKTEISEMNRNISRLQAEIEGLKGQRASLEAAIADAEQRGELAIKDANAKLSELEAALQRAKQDMARQLREYQELMNVKLALDIEIATYRKLLEGEESRLESGMQNMSIHTKTTSGYAGGLSSAYGGLTSPGLSYSLGSSFGSGAGSSSFSRTSSSRAVVVKKIETRDGKLVSESSDVLPK

SEQ ID NO: 84 - protein, 1184 aa, Homo sapiens
MVLLWEPAGAWLALGLALALGPSVAAAAPRQDCTGVECPPLENCIEEALEPGACCATCVQQGCACEGYQYYDCLQGGFVRGRVPAGQSYFVDFGSTECSCPPGGGKISCQFMLCPELPPNCIEAVVVADSCPQCGQVGCVHAGHKYAAGHTVHLPPCRACHCPDAGGELICYQLPGCHGNFSDAEEGDPERHYEDPYSYDQEVAEVEAATALGGEVQAGAVQAGAGGPPAALGGGSQPLSTIQAPPWPAVLPRPTAAAALGPPAPVQAKARRVTEDSEEEEEEEEEREEMAVTEQLAAGGHRGLDGLPTTAPAGPSLPIQEERAEAGARAEAGARPEENLILDAQATSRSTGPEGVTHAPSLGKAALVPTQAVPGSPRDPVKPSPHNILSTSLPDAAWIPPTREVPRKPQVLPHSHVEEDTDPNSVHSIPRSSPEGSTKDLIETCCAAGQQWAIDNDECLEIPESGTEDNVCRTAQRHCCVSYLQEKSCMAGVLGAKEGETCGAEDNDSCGISLYKQCCDCCGLGLRVRAEGQSCESNPNLGYPCNHVMLSCCEGEEPLIVPEVRRPPEPAAAPRRVSEAEMAGREALSLGTEAELPNSLPGDDQDECLLLPGELCQHLCINTVGSYHCACFPGFSLQDDGRTCRPEGHPPQPEAPQEPALKSEFSQVASNTIPLPLPQPNTCKDNGPCKQVCSTVGGSAICSCFPGYAIMADGVSCEDINECVTDLHTCSRGEHCVNTLGSFHCYKALTCEPGYALKDGECEDVDECAMGTHTCQPGFLCQNTKGSFYCQARQRCMDGFLQDPEGNCVDINECTSLSEPCRPGFSCINTVGSYTCQRNPLICARGYHASDDGTKCVDVNECETGVHRCGEGQVCHNLPGSYRCDCKAGFQRDAFGRGCIDVNECWASPGRLCQHTCENTLGSYRCSCASGFLLAADGKRCEDVNECEAQRCSQECANIYGSYQCYCRQGYQLAEDGHTCTDIDECAQGAGILCTFRCLNVPGSYQCACPEQGYTMTANGRSCKDVDECALGTHNCSEAETCHNIQGSFRCLRFECPPNYVQVSKTKCERTTCHDFLECQNSPARITHYQLNFQTGLLVPAHIFRIGPAPAFTGDTIALNIIKGNEEGYFGTRRLNAYTGVVYLQRAVLEPRDFALDVEMKLWRQGSVTTFLAKMHIFFTTFAL

SEQ ID NO: 85 - protein, 466 aa, Homo sapiens
MSTRSVSSSSYRRMFGGPGTASRPSSSRSYVTTSTRTYSLGSALRPSTSRSLYASSPGGVYATRSSAVRLRSSVPGVRLLQDSVDFSLADAINTEFKNTRTNEKVELQELNDRFANYIDKVRFLEQQNKILLAELEQLKGQGKSRLGDLYEEEMRELRRQVDQLTNDKARVEVERDNLAEDIMRLREKLQEEMLQREEAENTLQSFRQDVDNASLARLDLERKVESLQEEIAFLKKLHEEEIQELQAQIQEQHVQIDVDVSKPDLTAALRDVRQQYESVAAKNLQEAEEWYKSKFADLSEAANRNNDALRQAKQESTEYRRQVQSLTCEVDALKGTNESLERQMREMEENFAVEAANYQDTIGRLQDEIQNMKEEMARHLREYQDLLNVKMALDIEIATYRKLLEGEESRISLPLPNFSSLNLRETNLDSLPLVDTHSKRTLLIKTVETRDGQVINETSQHHDDLE

SEQ ID NO: 86 - protein, 866 aa, Homo sapiens
MFSMRIVCLVLSVVGTAWTADSGEGDFLAEGGGVRGPRVVERHQSACKDSDWPFCSDEDWNYKCPSGCRMKGLIDEVNQDFTNRINKLKNSLFEYQKNNKDSHSLTTNIMEILRGDFSSANNRDNTYNRVSEDLRSRIEVLKRKVIEKVQHIQLLQKNVRAQLVDMKRLEVDIDIKIRSCRGSCSRALAREVDLKDYEDQQKQLEQVIAKDLLPSRDRQHLPLIKMKPVPDLVPGNFKSQLQKVPPEWKALTDMPQMRMELERPGGNEITRGGSTSYGTGSETESPRNPSSAGSWNSGSSGPGSTGNRNPGSSGTGGTATWKPGSSGPGSTGSWNSGSSGTGSTGNQNPGSPRPGSTGTWNPGSSERGSAGHWTSESSVSGSTGQWHSESGSFRPDSPGSGNARPNNPDWGTFEEVSGNVSPGTRREYHTEKLVTSKGDKELRTGKEKVTSGSTTTTRRSCSKTVTKTVIGPDGHKEVTKEVVTSEDGSDCPEAMDLGTLSGIGTLDGFRHRHPDEAAFFDTASTGKTFPGFFSPMLGEFVSETESRGSESGIFTNTKESSSHHPGIAEFPSRGKSSSYSKQFTSSTSYNRGDSTFESKSYKMADEAGSEADHEGTHSTKRGHAKSRPVRDCDDVLQTHPSGTQSGIFNIKLPGSSKIFSVYCDQETSLGGWLLIQQRMDGSLNFNRTWQDYKRGFGSLNDEGEGEFWLGNDYLHLLTQRGSVLRVELEDWAGNEAYAEYHFRVGSEAEGYALQVSSYEGTAGDALIEGSVEEGAEYTSHNNMQFSTFDRDADQWEENCAEVYGGGWWYNNCQAANLNGIYYPGGSYDPRNNSPYEIENGVVWVSFRGADYSLRAVRMKIRPLVTQ

SEQ ID NO: 87 - protein, 357 aa, Homo sapiens
MGRQLAGCGDAGKKASFKMSTVHEILCKLSLEGDHSTPPSAYGSVKAYTNFDAERDALNIETAIKTKGVDEVTIVNILTNRSNAQRQDIAFAYQRRTKKELASALKSALSGHLETVILGLLKTPAQYDASELKASMKGLGTDEDSLIEIICSRTNQELQEINRVYKEMYKTDLEKDIISDTSGDFRKLMVALAKGRRAEDGSVIDYELIDQDARDLYDAGVKRKGTDVPKWISIMTERSVPHLQKVFDRYKSYSPYDMLESIRKEVKGDLENAFLNLVQCIQNKPLYFADRLYDSMKGKGTRDKVLIRIMVSRSEVDMLKIRSEFKRKYGKSLYYYIQQDTKGDYQKALLYLCGGDD

SEQ ID NO: 88 - protein, 129 aa, Homo sapiens
MSGRGKQGGKVRAKAKSRSSRAGLQFPVGRVHRLLRKGNYAERVGAGAPVYLAAVLEYLTAEILELAGNAARDNKKTRIIPRHLQLAIRNDEELNKLLGKVTIAQGGVLPNIQAVLLPKKTESQKTKSK

SEQ ID NO: 89 - protein, 377 aa, Homo sapiens
MCDDEETTALVCDNGSGLVKAGFAGDDAPRAVFPSIVGRPRHQGVMVGMGQKDSYVGDEAQSKRGILTLKYPIEHGIITNWDDMEKIWHHTFYNELRVAPEEHPTLLTEAPLNPKANREKMTQIMFETFNVPAMYVAIQAVLSLYASGRTTGIVLDSGDGVTHNVPIYEGYALPHAIMRLDLAGRDLTDYLMKILTERGYSFVTTAEREIVRDIKEKLCYVALDFENEMATAASSSSLEKSYELPDGQVITIGNERFRCPETLFQPSFIGMESAGIHETTYNSIMKCDIDIRKDLYANNVLSGGTTMYPGIADRMQKEITALAPSTMKIKIIAPPERKYSVWIGGSILASLSTFQQMWISKQEYDEAGPSIVHRKCF

SEQ ID NO: 90 - protein, 400 aa, Homo sapiens
MTSYSYRQSSATSSFGGLGGGSVRFGPGVAFRAPSIHGGSGGRGVSVSSARFVSSSSSGAYGGGYGGVLTASDGLLAGNEKLTMQNLNDRLASYLDKVRALEAANGELEVKIRDWYQKQGPGPSRDYSHYYTTIQDLRDKILGATIENSRIVLQIDNARLAADDFRTKFETEQALRMSVEADINGLRRVLDELTLARTDLEMQIEGLKEELAYLKKNHEEEISTLRGQVGGQVSVEVDSAPGTDLAKILSDMRSQYEVMAEQNRKDAEAWFTSRTEELNREVAGHTEQLQMSRSEVTDLRRTLQGLEIELQSQLSMKAALEDTLAETEARFGAQLAHIQALISGIEAQLGDVRADSERQNQEYQRLMDIKSRLEQEIATYRSLLEGQEDHYNNLSASKVL

SEQ ID NO: 91 - protein, 236 aa, Homo sapiens [sequence omitted]

SEQ ID NO: 92 - protein, 613 aa, Homo sapiens
MEFGLSWVFLVALLRGVQCQVQLVESGGGVVQPGRSLRLSCAASGFTFSSYGMHWVRQAPGKGLEWVAVISYDGSNKYYADSVKGRFTISRDNSKNTLYLQMNSLRAEDTAVYYCAKDWSEGVETFDIWGQGTMVTVSSGSASAPTLFPLVSCENSPSDTSSVAVGCLAQDFLPDSITFSWKYKNNSDISSTRGFPSVLRGGKYAATSQVLLPSKDVMQGTDEHVVCKVQHPNGNKEKNVPLPVIAELPPKVSVFVPPRDGFFGNPRKSKLICQATGFSPRQIQVSWLREGKQVGSGVTTDQVQAEAKESGPTTYKVTSTLTIKESDWLSQSMFTCRVDHRGLTFQQNASSMCVPDQDTAIRVFAIPPSFASIFLTKSTKLTCLVTDLTTYDSVTISWTRQNGEAVKTHTNISESHPNATFSAVGEASICEDDWNSGERFTCTVTHTDLPSPLKQTISRPKGVALHRPDVYLLPPAREQLNLRESATITCLVTGFSPADVFVQWMQRGQPLSPEKYVTSAPMPEPQAPGRYFAHSILTVSEEEWNTGETYTCVVAHEALPNRVTERTVDKSTEGEVSADEEGFENLWATASTFIVLFLLSLFYSTTVTLFKVK

SEQ ID NO: 93 - protein, 493 aa, Homo sapiens
MLKALFLTMLTLALVKSQDTEETITYTQCTDGYEWDPVRQQCKDIDECDIVPDACKGGMKCVNHYGGYLCLPKTAQIIVNNEQPQQETQPAEGTSGATTGVVAASSMATSGVLPGGGFVASAAAVAGPEMQTGRNNFVIRRNPADPQRIPSNPSHRIQCAAGYEQSEHNVCQDIDECTAGTHNCRADQVCINLRGSFACQCPPGYQKRGEQCVDIDECTIPPYCHQRCVNTPGSFYCQCSPGFQLAANNYTCVDINECDASNQCAQQCYNILGSFICQCNQGYELSSDRLNCEDIDECRTSSYLCQYQCVNEPGKFSCMCPQGYQVVRSRTCQDINECETTNECREDEMCWNYHGGFRCYPRNPCQDPYILTPENRCVCPVSNAMCRELPQSIVYKYMSIRSDRSVPSDIFQIQATTIYANTINTFRIKSGNENGEFYLRQTSPVSAMLVLVKSLSGPREHIVDLEMLTVSSIGTFRTSSVLRLTIIVGPFSF

SEQ ID NO: 94 - protein, 488 aa, Homo sapiens
MASKILLNVQEEVTCPICLELLTEPLSLDCGHSLCRACITVSNKEAVTSMGGKSSCPVCGISYSFEHLQANQHLANIVERLKEVKLSPDNGKKRDLCDHHGEKLLLFCKEDRKVICWLCERSQEHRGHHTVLTEEVFKECQEKLQAVLKRLKKEEEEAEKLEADIREEKTSWKYQVQTERQRIQTEFDQLRSILNNEEQRELQRLEEEEKKTLDKFAEAEDELVQQKQLVRELISDVECRSQWSTMELLQDMSGIMKWSEIWRLKKPKMVSKKLKTVFHAPDLSRMLQMFRELTAVRCYWVDVTLNSVNLNLNLVLSEDQRQVISVPIWPFQCYNYGVLGSQYFSSGKHYWEVDVSKKTAWILGVYCRTYSRHMKYVVRRCANRQNLYTKYRPLFGYWVIGLQNKCKYGVFEESLSSDPEVLTLSMAVPPCRVGVFLDYEAGIVSFFNVTSHGSLIYKFSKCCFSQPVYPYFNPWNCPAPMTLCPPSS

SEQ ID NO: 95 - protein, 1302 aa, Homo sapiens
MALRPGAGSGGGGAAGAGAGSAGGGGFMFPVAGGIRPPQAGLMPMQQQGFPMVSVMQPNMQGIMGMNYSSQMSQGPIAMQAGIPMGPMPAAGMPYLGQAPFLGMRPPGPQYTPDMQKQFAEEQQKRFEQQQKLLEEERKRRQFEEQKQKLRLLSSVKPKTGEKSRDDALEAIKGNLDGFSRDAKMHPTPASHPKKPGPSLEEKFLVSCDISTSGQEQIKLNTSEVGHKALGPGSSKKYPSLMASNGVAVDGCVSGTTTAEAENTSDQNLSIEESGVGVFPSQDPAQPRMPPWIYNESLVPDAYKKILETTMTPTGIDTAKLYPILMSSGLPRETLGQIWALANRTTPGKLTKEELYTVLAMIAVTQRGVPAMSPDALNQFPAAPIPTLSGFSMTLPTPVSQPTVIPSGPAGSMPLSLGQPVMGINLVGPVGGAAAQASSGFIPTYPANQVVKPEEDDFQDFQDASKSGSLDDSFSDFQELPASSKTSNSQHGNSAPSLLMPLPGTKALPSMDKYAVFKGIAADKSSENTVPPGDPGDKYSAFRELEQTAENKPLGESFAEFRSAGTDDGFTDFKTADSVSPLEPPTKDKTFPPSFPSGTIQQKQQTQVKNPLNLADLDMFSSVNCSSEKPLSFSAVFSTSKSVSTPQSTGSAATMTALAATKTSSLADDFGEFSLFGEYSGLAPVGEQDDFADFMAFSNSSISSEQKPDDKYDALKEEASPVPLTSNVGSTVKGGQNSTAASTKYDVFRQLSLEGSGLGVEDLKDNTPSGKSDDDFADFHSSKFSSINSDKSLGEKAVAFRHTKEDSASVKSLDLPSIGGSSVGKEDSEDALSVQFDMKLADVGGDLKHVMSDSSLDLPTVSGQHPPAADIEDLKYAAFGSYSSNFAVSTLTSYDWSDRDDATQGRKLSPFVLSAGSGSPSATSILQKKETSFGSSENITMTSLSKVTTFVSEDALPETTFPALASFKDTIPQTSEQKEYENRDYKDFTKQDLPTAERSQEATCPSPASSGASQETPNECSDDFGEFQSEKPKISKFDFLVATSQSKMKSSEEMIKSELATFDLSVQGSHKRSLSLGDKEISRSSPSPALEQPFRDRSNTLNEKPALPVIRDKYKDLTGEVEENERYAYEWQRCLGSALNVIKKANDTLNGISSSSVCTEVIQSAQGMEYLLGVVEVYRVTKRVELGIKATAVCSEKLQQLLKDIDKVWNNLIGFMSLATLTPDENSLDFSSCMLRPGIKNAQELACGVCLLNVDSRSRAFNSETDSFKLAYGGHQYHASCANFWINCVEPKPPGLVLPDLL

SEQ ID NO: 96 - protein, 140 aa, Homo sapiens
MAGWNAYIDNLMADGTCQDAAIVGYKDSPSVWAAVPGKTFVNITPAEVGVLVGKDRSSFYVNGLTLGGQKCSVIRDSLLQDGEFSMDLRTKSTGGAPTFNVTVTKTDKTLVLLMGKEGVHGGLINKKCYEMASHLRRSQY

SEQ ID NO: 97 - protein, 103 aa, Homo sapiens [sequence omitted]

SEQ ID NO: 98 - protein, 142 aa, Homo sapiens; identical to SEQ ID NO: 2

SEQ ID NO: 99 - protein, 201 aa, Homo sapiens
MANKGPSYGMSREVQSKIEKKYDEELEERLVEWIIVQCGPDVGRPDRGRLGFQVWLKNGVILSKLVNSLYPDGSKPVKVPENPPSMVFKQMEQVAQFLKAAEDYGVIKTDMFQTVDLFEGKDMAAVQRTLMALGSLAVTKNDGHYRGDPNWFMKKAQEHKREFTESQLQEGKHVIGLQMGSNRGASQAGMTGYGRPRQIIS

SEQ ID NO: 100 - protein, 338 aa, Homo sapiens
MSLSAFTLFLALIGGTSGQYYDYDFPLSIYGQSSPNCAPECNCPESYPSAMYCDELKLKSVPMVPPGIKYLYLRNNQIDHIDEKAFENVTDLQWLILDHNLLENSKIKGRVFSKLKQLKKLHINHNNLTESVGPLPKSLEDLQLTHNKITKLGSFEGLVNLTFIHLQHNRLKEDAVSAAFKGLKSLEYLDLSFNQIARLPSGLPVSLLTLYLDNNKISNIPDEYFKRFNALQYLRLSHNELADSGIPGNSFNVSSLVELDLSYNKLKNIPTVNENLENYYLEVNQLEKFDIKSFCKILGPLSYSKIKHLRLDGNRISETSLPPDMYECLRVANEVTLN

SEQ ID NO: 101 - protein, 147 aa, Homo sapiens; identical to SEQ ID NO: 7

SEQ ID NO: 102 - protein, 491 aa, Homo sapiens
MKRMVSWSFHKLKTMKHLLLLLLCVFLVKSQGVNDNEEGFFSARGHRPLDKKREEAPSLRPAPPPISGGGYRARPAKAAATQKKVERKAPDAGGCLHADPDLGVLCPTGCQLQEALLQQERPIRNSVDELNNNVEAVSQTSSSSFQYMYLLKDLWQKRQKQVKDNENVVNEYSSELEKHQLYIDETVNSNIPTNLRVLRSILENLRSKIQKLESDVSAQMEYCRTPCTVSCNIPVVSGKECEEIIRKGGETSEMYLIQPDSSVKPYRVYCDMNTENGGWTVIQNRQDGSVDFGRKWDPYKQGFGNVATNTDGKNYCGLPGEYWLGNDKISQLTRMGPTELLIEMEDWKGDKVKAHYGGFTVQNEANKYQISVNKYRGTAGNALMDGASQLMGENRTMTIHNGMFFSTYDRDNDGWLTSDPRKQCSKEDGGGWWYNRCHAANPNGRYYWGGQYTWDMAKHGTDDGVVWMNWKGSWYSMRKMSMKIRPFFPQQ

SEQ ID NO: 103 - protein, 236 aa, Homo sapiens
MDMRVPAQLLGLLLLWFPGSRCDIQMTQSPSSVSASVGDRVTITCRASQGISSWLAWYQQKPGKAPKLLIYAASSLQSGVPSRFSGSGSGTDFTLTISSLQPEDFATYYCQQAHSFPFTFGPGTKVDIKRTVAAPSVFIFPPSDEQLKSGTASVVCLLNNFYPREAKVQWKVDNALQSGNSQESVTEQDSKDSTYSLSSTLTLSKADYEKHKVYACEVTHQGLSSPVTKSFNRGEC

SEQ ID NO: 104 - protein, 609 aa, Homo sapiens [sequence omitted]

SEQ ID NO: 105 - protein, 267 aa, Homo sapiens
MKAAVLTLAVLFLTGSQARHFWQQDEPPQSPWDRVKDLATVYVDVLKDSGRDYVSQFEGSALGKQLNLKLLDNWDSVTSTFSKLREQLGPVTQEFWDNLEKETEGLRQEMSKDLEEVKAKVQPYLDDFQKKWQEEMELYRQKVEPLRAELQEGARQKLHELQEKLSPLGEEMRDRARAHVDALRTHLAPYSDELRQRLAARLEALKENGGARLAEYHAKATEHLSTLSEKAKPALEDLRQGLLPVLESFKVSFLSALEEYTKKLNTQ

SEQ ID NO: 106 - protein, 1744 aa, Homo sapiens
MRLLWGLIWASSFFTLSLQKPRLLLFSPSVVHLGVPLSVGVQLQDVPRGQVVKGSVFLRNPSRNNVPCSPKVDFTLSSERDFALLSLQVPLKDAKSCGLHQLLRGPEVQLVAHSPWLKDSLSRTTNIQGINLLFSSRRGHLFLQTDQPIYNPGQRVRYRVFALDQKMRPSTDTITVMVENSHGLRVRKKEVYMPSSIFQDDFVIPDISEPGTWKISARFSDGLESNSSTQFEVKKYVLPNFEVKITPGKPYILTVPGHLDEMQLDIQARYIYGKPVQGVAYVRFGLLDEDGKKTFFRGLESQTKLVNGQSHISLSKAEFQDALEKLNMGITDLQGLRLYVAAAIIESPGGEMEEAELTSWYFVSSPFSLDLSKTKRHLVPGAPFLLQALVREMSGSPASGIPVKVSATVSSPGSVPEVQDIQQNTDGSGQVSIPIIIPQTISELQLSVSAGSPHPAIARLTVAAPPSGGPGFLSIERPDSRPPRVGDTLNLNLRAVGSGATFSHYYYMILSRGQIVFMNREPKRTLTSVSVFVDHHLAPSFYFVAFYYHGDHPVANSLRVDVQAGACEGKLELSVDGAKQYRNGESVKLHLETDSLALVALGALDTALYAAGSKSHKPLNMGKVFEAMNSYDLGCGPGGGDSALQVFQAAGLAFSDGDQWTLSRKRLSCPKEKTTRKKRNVNFQKAINEKLGQYASPTAKRCCQDGVTRLPMMRSCEQRAARVQQPDCREPFLSCCQFAESLRKKSRDKGQAGLQRALEILQEEDLIDEDDIPVRSFFPENWLWRVETVDRFQILTLWLPDSLTTWEIHGLSLSKTKGLCVATPVQLRVFREFHLHLRLPMSVRRFEQLELRPVLYNYLDKNLTVSVHVSPVEGLCLAGGGGLAQQVLVPAGSARPVAFSVVPTAAAAVSLKVVARGSFEFPVGDAVSKVLQIEKEGAIHREELVYELNPLDHRGRTLEIPGNSDPNMIPDGDFNSYVRVTASDPLDTLGSEGALSPGGVASLLRLPRGCGEQTMIYLAPTLAASRYLDKTEQWSTLPPETKDHAVDLIQKGYMRIQQFRKADGSYAAWLSRDSSTWLTAFVLKVLSLAQEQVGGSPEKLQETSNWLLSQQQADGSFQDPCPVLDRSMQGGLVGNDETVALTAFVTIALHHGLAVFQDEGAEPLKQRVEASISKANSFLGEKASAGLLGAHAAAITAYALSLTKAPVDLLGVAHNNLMAMAQETGDNLYWGSVTGSQSNAVSPTPAPRNPSDPMPQAPALWIETTAYALLHLLLHEGKAEMADQASAWLTRQGSFQGGFRSTQDTVIALDALSAYWIASHTTEERGLNVTLSSTGRNGFKSHALQLNNRQIRGLEEELQFSLGSKINVKVGGNSKGTLKVLRTYNVLDMKNTTCQDLQIEVTVKGHVEYTMEANEDYEDYEYDELPAKDDPDAPLQPVTPLQLFEGRRNRRRREAPKVVEEQESRVHYTVCIWRNGKVGLSGMAIADVTLLSGFHALRADLEKLTSLSDRYVSHFETEGPHVLLYFDSVPTSRECVGFEAVQEVPVGLVQPASATLYDYYNPERRCSVFYGAPSKSRLLATLCSAEVCQCAEGKCPRQRRALERGLQDEDGYRMKFACYYPRVEYGFQVKVLREDSRAAFRLFETKITQVLHFTKDVKAAANQMRNFLVRASCRLRLEPGKEYLIMGLDGATYDLEGHPQYLLDSNSWIEEMPSERLCRSTRQRAACAQLNDFLQEYGTQGCQV

SEQ ID NO: 107 - protein, 1663 aa, Homo sapiens
MGPTSGPSLLLLLLTHLPLALGSPMYSIITPNILRLESEETMVLEAHDAQGDVPVTVTVHDFPGKKLVLSSEKTVLTPATNHMGNVTFTIPANREFKSEKGRNKFVTVQATFGTQVVEKVVLVSLQSGYLFIQTDKTIYTPGSTVLYRIFTVNHKLLPVGRTVMVNIENPEGIPVKQDSLSSQNQLGVLPLSWDIPELVNMGQWKIRAYYENSPQQVFSTEFEVKEYVLPSFEVIVEPTEKFYYIYNEKGLEVTITARFLYGKKVEGTAFVIFGIQDGEQRISLPESLKRIPIEDGSGEVVLSRKVLLDGVQNPRAEDLVGKSLYVSATVILHSGSDMVQAERSGIPIVTSPYQIHFTKTPKYFKPGMPFDLMVFVTNPDGSPAYRVPVAVQGEDTVQSLTQGDGVAKLSINTHPSQKPLSITVRTKKQELSEAEQATRTMQALPYSTVGNSNNYLHLSVLRTELRPGETLNVNFLLRMDRAHEAKIRYYTYLIMNKGRLLKAGRQVREPGQDLVVLPLSITTDFIPSFRLVAYYTLIGASGQREVVADSVWVDVKDSCVGSLVVKSGQSEDRQPVPGQQMTLKIEGDHGARVVLVAVDKGVFVLNKKNKLTQSKIWDVVEKADIGCTPGSGKDYAGVFSDAGLTFTSSSGQQTAQRAELQCPQPAARRRRSVQLTEKRMDKVGKYPKELRKCCEDGMRENPMRFSCQRRTRFISLGEACKKVFLDCCNYITELRRQHARASHLGLARSNLDEDIIAEENIVSRSEFPESWLWNVEDLKEPPKNGISTKLMNIFLKDSITTWEILAVSMSDKKGICVADPFEVTVMQDFFIDLRLPYSVVRNEQVEIRAVLYNYRQNQELKVRVELLHNPAFCSLATTKRRHQQTVTIPPKSSLSVPYVIVPLKTGLQEVEVKAAVYHHFISDGVRKSLKVVPEGIRMNKTVAVRTLDPERLGREGVQKEDIPPADLSDQVPDTESETRILLQGTPVAQMTEDAVDAERLKHLIVTPSGCGEQNMIGMTPTVIAVHYLDETEQWEKFGLEKRQGALELIKKGYTQQLAFRQPSSAFAAFVKRAPSTWLTAYVVKVFSLAVNLIAIDSQVLCGAVKWLILEKQKPDGVFQEDAPVIHQEMIGGLRNNNEKDMALTAFVLISLQEAKDICEEQVNSLPGSITKAGDFLEANYMNLQRSYTVAIAGYALAQMGRLKGPLLNKFLTTAKDKNRWEDPGKQLYNVEATSYALLALLQLKDFDFVPPVVRWLNEQRYYGGGYGSTQATFMVFQALAQYQKDAPDHQELNLDVSLQLPSRSSKITHRIHWESASLLRSEETKENEGFTVTAEGKGQGTLSVVTMYHAKAKDQLTCNKFDLKVTIKPAPETEKRPQDAKNTMILEICTRYRGDQDATMSILDISMMTGFAPDTDDLKQLANGVDRYISKYELDKAFSDRNTLIIYLDKVSHSEDDCLAFKVHQYFNVELIQPGAVKVYAYYNLEESCTRFYHPEKEDGKLNKLCRDELCRCAEENCFIQKSDDKVTLEERLDKACEPGVDYVYKTRLVKVQLSNDFDEYIMAIEQTIKSGSDEVQVGQQRTFISPIKCREALKLEEKKHYLMWGLSSDFWGEKPNLSYIIGKDTWVEHWPEEDECQDEENQKQCQDLGAFTESMVVFGCPN

SEQ ID NO: 108 - protein, 375 aa, Homo sapiens
MDDDIAALVVDNGSGMCKAGFAGDDAPRAVFPSIVGRPRHQGVMVGMGQKDSYVGDEAQSKRGILTLKYPIEHGIVTNWDDMEKIWHHTFYNELRVAPEEHPVLLTEAPLNPKANREKMTQIMFETFNTPAMYVAIQAVLSLYASGRTTGIVMDSGDGVTHTVPIYEGYALPHAILRLDLAGRDLTDYLMKILTERGYSFTTTAEREIVRDIKEKLCYVALDFEQEMATAASSSSLEKSYELPDGQVITIGNERFRCPEALFQPSFLGMESCGIHETTFNSIMKCDVDIRKDLYANTVLSGGTTMYPGIADRMQKEITALAPSTMKIKIIAPPERKYSVWIGGSILASLSTFQQMWISKQEYDESGPSIVHRKCF

SEQ ID NO: 109 - protein, 57 aa, Homo sapiens
MVHLTPEEKSAVTALWGKVNVDEVGGEALGRLLVIYPWTQRFFESFGDLSTPDAVMG

SEQ ID NO: 110 - protein, 142 aa, Homo sapiens; identical to SEQ ID NO: 2

SEQ ID NO: 111 - protein, 1075 aa, Homo sapiens
MVVEVDSMPAASSVKKPFGLRSKMGKWCCRCFPCCRESGKSNVGTSGDHDDSAMKTLRSKMGKWCRHCFPCCRGSGKSNVGASGDHDDSAMKTLRNKMGKWCCHCFPCCRGSSKSKVGAWGDYDDSAFMEPRYHVRGEDLDKLHRAAWWGKVPRKDLIVMLRDTDVNKQDKQKRTALHLASANGNSEVVKLLLDRRCQLNVLDNKKRTALIKAVQCQEDECALMLLEHGTDPNIPDEYGNTTLHYAIYNEDKLMAKALLLYGADIESKNKHGLTPLLLGVHEQKQQVVKFLIKKKANLNALDRYGRTALILAVCCGSASIVSLLLEQNIDVSSQDLSGQTAREYAVSSHHHVICQLLSDYKEKQMLKISSENSNPEQDLKLTSEEESQRFKGSENSQPEKMSQEPEINKDGDREVEEEMKKHESNNVGLLENLTNGVTAGNGDNGLIPQRKSRTPENQQFPDNESEEYHRICELLSDYKEKQMPKYSSENSNPEQDLKLTSEEESQRLKGSENGQPEKRSQEPEINKDGDRELENFMAIEEMKKHRSTHVGFPENLTNGATAGNGDDGLIPPRKSRTPESQQFPDTENEEYHSDEQNDTQKQFCEEQNTGILHDEILIHEEKQIEVVEKMNSELSLSCKKEKDILHENSTLREEIAMLRLELDTMKHQSQLREKKYLEDIESVKKRNDNLLKALQLNELTMDDDTAVLVIDNGSGMCKAGFAGDDAPRAVFPSIVGRPRQQGMMGGMHQKESYVGKEAQSKRGILTLKYPMEHGIITNWDDMEKIWHHTFYNELRVAPEEHPVLLTEATLNPKANREKMTQIMFETFNTPAMYVAIQAVLSLYTSGRTTGIVMDSGDGVTHTVPIYEGNALPHATLRLDLAGRELPDYLMKILTEHGYRFTTMAEREIVRDIKEKLCYVALDFEQEMATVASSSSLEKSYELPDGQVITIGNERFRCPEALFQPCFLGMESCGIHETTFNSIMKSDVDIRKDLYTNTVLSGGTTMYPGMAHRMQKEIAALAPSMMKIRIIAPPKRKYSVWVGGSILASLSTFQQMWISKQEYDESGPSIVHRKCL

SEQ ID NO: 112 - protein, 1118 aa, Homo sapiens
MEIKDQGAQMEPLLPTRNDEEAVVDRGGTRSILKTHFEKEDLEGHRTLFIGVHVPLGGRKSHRRHRHRGHKHRKRDRERDSGLEDGRESPSFDTPSQRVQFILGTEDDDEEHIPHDLFTELDEICWREGEDAEWRETARWLKFEEDVEDGGERWSKPYVATLSLHSLFELRSCILNGTVLLDMHANTLEEIADMVLDQQVSSGQLNEDVRHRVHEALMKQHHHQNQKKLTNRIPIVRSFADIGKKQSEPNSMDKNAGQVVSPQSAPACVENKNDVSRENSTVDFSKGLGGQQKGHTSPCGMKQRHEKGPPHQQEREVDLHFMKKIPPGAEASNILVGELEFLDRTVVAFVRLSPAVLLQGLAEVPIPTRFLFILLGPLGKGQQYHEIGRSIATLMTDEVFHDVAYKAKDRNDLVSGIDEFLDQVTVLPPGEWDPSIRIEPPKNVPSQEKRKIPAVPNGTAAHGEAEPHGGHSGPELQRTGRIFGGLILDIKRKAPYFWSDFRDAFSLQCLASFLFLYCACMSPVITFGGLLGEATEGRISAIESLFGASMTGIAYSLFGGQPLTILGSTGPVLVFEKILFKFCKEYGLSYLSLRASIGLWTATLCIILVATDASSLVCYITRFTEEAFASLICIIFIYEALEKLFELSEAYPINMHNDLELLTQYSCNCVEPHNPSNGTLKEWRESNISASDIIWENLTVSECKSLHGEYVGRACGHDHPYVPDVLFWSVILFFSTVTLSATLKQFKTSRYFPTKVRSIVSDFAVFLTILCMVLIDYAIGIPSPKLQVPSVFKPTRDDRGWFVTPLGPNPWWTVIAAIIPALLCTILIFMDQQITAVIINRKEHKLKKGCGYHLDLLMVAVMLGVCSIMGLPWFVAATVLSITHVNSLKLESECSAPGEQPKFLGIREQRVTGLMIFILMGSSVFMTSILKFIPMPVLYGVFLYMGASSLKGIQFFDRIKLFWMPAKHQPDFIYLRHVPLRKVHLFTIIQMSCLGLLWIIKVSRAAIVFPMMVLALVFVRKLMDLLFTKRELSWLDDLMPESKKKKLEDAEKEEEQSMLAMEDEGTVQLPLEGHYRDDPSVINISDEMSKTALWRNLLITADNSKDKESSFPSKSSPS

SEQ ID NO: 113 - protein, 140 aa, Homo sapiens
MAENREPRGAVEAELDPVEYTLRKRLPSRLPRRPNDIYVNMKTDFKAQLARCQKLLDGGARGQNACSEIYIHGLGLAINRAINIALQLQAGSFGSLQVAANTSTVELVDELEPETDTREPLTRIRNNSAIHIRVFRVTPK

SEQ ID NO: 114 - protein, 369 aa, Homo sapiens
RPAPEPALDLRCGMADEGKSYSEHDDERVNFPQRKKKGRGPFRWKYGEGNRRSGRGGSGIRSSRLEEDDGDVAMSDAQDGPRVRYNPYTTRPNRRGDTWHDRDRIHVTVRRDRAPPERGGAGTSQDGTSKNWFKITIPYGRKYDKAWLLSMIQSKCSVPFTPIEFHYENTRAQFFVEDASTASALKAVNYKILDRENRRISIIINSSAPPHTILNELKPEQVEQLKLIMSKRYDGSQQALDLKGLRSDPDLVAQNIDVVLNRRSCMAATLRIIEENIPELLSLNLSNNRLYRLDDMSSIVQKAPNLKILNLSGNELKSERELDKIKGLKLEELWLDGNSLCDTFRDQSTYIRSVVACVSPPGDLHPLGG

SEQ ID NO: 115 - protein, 638 aa, Homo sapiens
MMNCWFSCTPKNRHAADWNKYDDRLMKAAERGDVEKVTSILAKKGVNPGKLDVEGRSVFHVVTSKGNLECLNAILIHGVDITTSDTAGRNALHLAAKYGHALCLQKLLQYNCPTEHADLQGRTALHDAAMADCPSSIQLLCDHGASVNAKDVDGRTPLVLATQMSRPTICQLLIDRGADVNSRDKQNRTALMLGCEYGCRDAVEVLIKNGADISLLDALGHDSSYYARIGDNLDILTLLKTASENTNKGRELWKKGPSLQQRNLTHMQDEVNVKSHQREHQNIQDLEIENEDLKERLRKIQQEQRILLDKVNGLQLQLNEEVMVADDLESEREKLKSLLAAKEKQHEESLRTIEALKNRFKYFESDHLGSGSHFSNRKEDMLLKQGQMYMADSQCTSPGIPAHMQSRSMLRPLELSLPSQTSYSENEILKKELEAMRTFCESAKQDRLKLQNELAHKVAECKALALECERVKEDSDEQIKQLEDALKDVQKRMYESEGKVKQMQTHFLALKEHLTSEAASGNHRLTEELKDQLKDLKVKYEGASAEVGKLRNQIKQNEMIVEEFKRDEGKLIEENKRLQKELSMCEMEREKKGRKVTEMEGQAKELSAKLALSIPAEKFENMKSSLSNEVNEKAKKKK

SEQ ID NO: 116 - protein, 227 aa, Homo sapiens
MSHTEVKLKIPFGNKLLDAVCLVPNKSLTYGIILTHGASGDMNLPHLMSLASHLASHGFFCLRFTCKGLNIVHRIKAYKSVLNYLKTSGEYKLAGVFLGGRSMGSRAAASVMCHIEPDDGDDFVRGLICISYPLHHPKQQHKLRDEDLFRLKEPVLFVSGSADEMCEKNLLEKVAQKMQAPHKIHWIEKANHSMAVKGRSTNDVFKEINTQILFWIQEITEMDKKCH

SEQ ID NO: 117 - protein, 1413 aa, Homo sapiens; identical to SEQ ID NO: 13

SEQ ID NO: 118 - protein, 4471 aa, Homo sapiens
MVPEEVEVEIDEIPVLSEEGEEEEETYSQKVESVDKVRAKRVSLRTESLGQPLNREDEEMDKEISEKLPSKRTAKHIMEKMHLHMLCTPLPEEFLDQNVVFFLRNTKEAISEATDMKEAMEIMPETLEYGIINANVLHFLKNIICQVFLPALSFNQHRTSTTVGVTSGEVSNSSEHESDLPPMPGEAVEYHSIQLIRDEFLMNVQKFASNIQRTMQQLEGEIKLEMPIISVEGEVSDLAADPETVDILEQCVINWLNQISTAVEAQLKKTPQGKGPLAEIEFWRERNATLSALHEQTKLPIVRKVLDVIKESDSMLVANLQPVFTELFKFHTEASDNVRFLSTVERYFKNITHGSGFHVVLDTIPAMMSALRMVWIISRHYNKDERMIPLMERIAWEIAERVCRVVNLRTLFKENRASAQSKTLEARNTLRLWKKAYFDTRAKIEASGREDRWEFDRKRLFERTDYMATICQDLSDVLQVLEEFYNIFGPELKAVTGDPKRIDDVLCRVDGLVTPMENLTFDPFSIKSSQFWKYVMDEFKIEVLIDIINKIFVQNLENPPLYKNHPPVAGAIYWERSLFFRIKHTILRFQEVQEILDSDRGQEVKQKYLEVGRTMKEYEDRKYEQWMEVTEQVLPALMKKSLLTKSSIATEEPSTLERGAVFAINFSPALREIINETKYLEQLGFTVPELARNVALQEDKFLRYTAGIQRMLDHYHMLIGTLNDAESVLLKDHSQELLRVFRSGYKRLNWNSLGIGDYITGCKQAIGKFESLVHQIHKNADDISSRLTLIEAINLFKYPAAKSEEELPGVKEFFEHIERERASDVDHMVRWYLAIGPLLTKVEGLVVHTNTGKAPKLASYYKYWEKKIYEVLTKLILKNLQSFNSLILGNVPLFHTETILTAPEIILHPNTNEIDKMCFHCVRNCVEITKHFVRWMNGSCIECPPQKGEEEEVVIINFYNDISLNPQIIEQAVMIPQNVHRILINLMKYLQKWKRYRPLWKLDKAIVMEKFAAKKPPCVAYDEKLQFYSKIAYEVMRHPLIKDEHCIRLQLRHLANTVQENAKSWVISLGKLLNESAKEELYNLHEEMEHLAKNLRKIPNTLEDLKFVLATIAEIRSKSLVMELRYRDVQERYRTMAMYNLFPPDAEKELVDKIESIWSNLFNDSVNVEHALGDIKRTFTELTRGEIMNYRVQIEEFAKRFYSEGPGSVGDDLDKGVELLGVYERELARHEKSRQELANAEKLFDLPITMYPELLKVQKEMSGLRMIYELYEGLKVAKEEWSQTLWINLNVQILQEGIEGFLRALRKLPRPVRGLSVTYYLEAKMKAFKDSIPLLLDLKNEALRDRHWKELMEKTSVFFEMTETFTLENMFAMELHKHTDVLNEIVTAAIKEVAIEKAVKEILDTWENMKFTVVKYCKGTQERGYILGSVDEIIQSLDDNTFNLQSISGSRFVGPFLQTVHKWEKTLSLIGEVIEIWMLVQRKWMYLESIFIGGDIRSQLPEEAKKFDNIDKVFKRIMGETLKDPVIKRCCEAPNRLSDLQNVSEGLEKCQKSLNDYLDSKRNAFPRFFFISDDELLSILGSSDPLCVQEHMIKMYDNIASLRFNDGDSGEKLVSAMISAEGEVMEFRKIVRAEGRVEDWMTAVLNEMRRTNRLITKEAIFRYCEDRSRVDWMLLYQGMVVLAASQVWWTWEVEDVFHKAQKGEKQAMKNYGRKMHRQIDELVTRITMPLSKNDRKKYNTVLIIDVHARDIVDSFIRGSILEAREFDWESQLRFYWDREPDELNIRQCTGTFGYGYEYMGLNGRLVITPLTDRIYLTLTQALSMYLGGAPAGPAGTGKTETTKDLAKALGLLCVVTNCGEGMDYRAVGKIFSGLAQCGAWGCFDEFNRIDASVLSVISSQIQTIRNALIHQLTTFQFEGQEISLDSRMGIFITMNPGYAGRTELPESVKALFRPVVVIVPDLQQICEIMLFSEGFLEAKTLAKKMTVLYKLAREQLSKQYHYDFGLRALKSVLVMAGELKRGSSDLREDVVLMRALRDMNLPKFVFEDVPLFLGLISDLFPGLDCPRVRYPDFNDAVEQVLEENGYAVLPIQVDKVVQMFETMLTRHTTMVVGPTRGGKSVVINTLCQAQTKLGLTTKLYILNPKAVSVIELYGILDPTTRDWTDGVLSNIFREINKPTDKKERKYILFDGDVDALWVENMNSVMDDNRLLTLANGERIRLQAHCALLFEVGDLQYASPATVSRCGMVYVDPKNLKYRPYWKKWVNQIPNKVEQYNLNSLFEKYVPYLMDVIVEGIVDGRQAEKLKTIVPQTDLNMVTQLAKMLDALLEGEIEDLDLLECYFLEALYCSLGASLLEDGRMKFDEYIKRLASLSTVDTEGVWANPGELPGQLPTLYDFHFDNKRNQWVPWSKLVPEYIHAPERKFINILVHTVDTTRTTWILEQMVKIKQPVIFVGESGTSKTATTQNFLKNLSEETNIVLMVNFSSRTTSMDIQRNLEANVEKRTKDTYGPPMGKRLLVFMDDMNMPRVDEYGTQQPIALLKLLLEKGYLYDRGKELNCKSIRDLGFIAAMGKAGGGRNEVDPRFISLFSVFNVPFPSEESLHLIYSSILKGHTSTFHESIVAVSGKLTFCTLALYKNIVQDLPPTPSKFHYIFNLRDLSRVFNGLVLTNPERFQTVAQMVRVWRNECLRVFHDRLISETDKQLVQQHIGSLVVEHFKDDVEVVMRDPILFGDFQMALHEGEPRIYEDIQDYEAAKALFQEILEEYNESNTKMNLVLFDDALEHLTRVHRIIRMDRGHALLVGVGGSGKQSLSRLAAFTASCEVFEILLSRGYSENSFREDLKSLYLKLGIENKAMIFLFTDAHVAEEGFLELINNMLTSGIVPALFSEEEKESILSQIGQEALKQGMGPAKESVWQYFVNKSANNLHIVLGMSPVGDTLRTWCRNFPGMVNNTGIDWFMPWPPQALHAVAKSFLGYNPMIPAENIENVVKHVVLVHQSVDHYSQQFLQKLRRSNYVTPKNYLDFINTYSKLLDEKTQCNIAQCKRLDGGLDKLKEATIQLDELNQKLAEQKIVLAEKSAACEALLEEIAVNTAVAEEKKKLAEEKAMEIEEQNKVIAMEKAEAETTLAEVMPILEAAKLELQKLDKSDVTEIRSFAKPPKQVQTVCECILIMKGYKELNWKTAKGVMSDPNFLRSLMEIDFDSITQSQVKNIKGLLKTLNTTTEEMEAVSKAGLGMLKFVEAVMGYCDVFREIKPKREKVARLERNFYLTKRELERIQNELAAIQKELETLGAKYEAAILEKQKLQEEAEIMERRLIAADKLISGLGSENIRWLNDLDELMHRRVKLLGDCLLCAAFLSYEGAFTWEFRDEMVNRIWQNDILEREIPLSQPFRLESLLTDDVEISRWGSQGLPPDELSVQNGILTTRASRFPLCIDPQQQALNWIKRKEEKNNLRVASFNDPDFLKQLEMSIKYGTPFLFRDVDEYIDPVIDNVLEKNIKVSQGRQFIILGDKEVDYDSNFRLYLNTKLANPRYSPSVFGKAMVINYTVTLKGLEDQLLSVLVAYERRELEEQREHLIQETSENKNLLKDLEDSLLRELATSTGNMLDNVDLVHTLEETKSKATEVSEKLKLAEKTALDIDRLRDGYRPAARRGAILFFVLSEMALVNSMYQYSLIAFLEVFRLSLKKSLPDSILMKRLRNIMDTLTFSIYNHGCTGLFERHKLLFSFNMTIKIEQAEGRVPQEELDFFLKGNISLEKSKRKKPCAWLSDQGWEDIILLSEMFSDNFGQLPDDVENNQTVWQEWYDLDSLEQFPVPLGYDNNITPFQKLLILRCFRVDRVYRAVTDYVTVTMGEKYVQPPMISFEAIFEQSTPHSPIVFILSPGSDPATDLMKLAERSGFGGNRLKFLAMGQGQEKVALQLLETAVARGQWLMLQNCHLLVKWLKDLEKSLERITKPHPDFRLWLTTDPTKGFPIGILQKSLKVVTEPPNGLKLNMRATYFKISHEMLDQCPHPAFKPLVYVLAFFHAVVQERRKFGKIGWNVYYDFNESDFQVCMEILNTYLTKAFQQRDPRIPWGSLKYLIGEVMYGGRAIDSFDRRILTIYMDEYLGDFIFDTFQPFHFFRNKEVDYKIPVGDEKEKFVEAIEALPLANTPEVFGLHPNAEIGYYTQAARDMWAHLLELQPQTGESSSGISRDDYIGQVAKEIENKMPKVFDLDQVRKRLGTGLSPTSVVLLQELERFNKLVVRMTKSLAELQRALAGEVGMSNELDDVARSLFIGHIPNIWRRLAPDTLKSLGNWMVYFLRRFSQYMLWVTESEPSVMWLSGLHIPESYLTALVQATCRKNGWPLDRSTLFTQVTKFQDADEVNERAGQGCFVSGLYLEGADWDIEKGCLIKSKPKVLVVDLPILKIIPIEAHRLKLQNTFRTPVYTTSMRRNAMGVGLVFEADLFTTRHISHWVLQGVCLTLNSD

SEQ ID NO: 119 - protein, 382 aa, Homo sapiens
MGDWSALGKLLDKVQAYSTAGGKVWLSVLFIFRILLLGTAVESAWGDEQSAFRCNTQQPGCENVCYDKSFPISHVRFWVLQIIFVSVPTLLYLAHVFYVMRKEEKLNKKEEELKVAQTDGVNVDMHLKQIEIKKFKYGIEEHGKVKMRGGLLRTYIISILFKSIFEVAFLLIQWYIYGFSLSAVYTCKRDPCPHQVDCFLSRPTEKTIFIIFMLVVSLVSLALNIIELFYVFFKGVKDRVKGKSDPYHATSGALSPAKDCGSQKYAYFNGCSSPTAPLSPMSPPGYKLVTGDRNNSSCRNYNKQASEQNWANYSAEQNRMGQAGSTISNSHAQPFDFPDDNQNSKKLAAGHELQPLAIVDQRPSSRASSRASSRPRPDDLEI

SEQ ID NO: 120 - protein, 169 aa, Homo sapiens
CRAVGSASKLMELVHGGLQLRAKHPTLVHADSSRSHLIITVTLTTASCSDSTADQACSATLPREQTEAGRAGRSRRASQGALAPQLVPGNPAGHAEQVQARLQLVDSAGSECVGGDAKLLVILCISPSQRHLAQTLQGLGFGIRARQVQRGPARKKPPSSQTEGKRRPD

SEQ ID NO: 121 - protein, 335 aa, Homo sapiens
MGKVKVGVNGFGRIGRLVTRAAFNSGKVDIVAINDPFIDLNYMVYMFQYDSTHGKFHGTVKAENGKLVINGNPITIFQERDPSKIKWGDAGAEYVVESTGVFTTMEKAGAHLQGGAKRVIISAPSADAPMFVMGVNHEKYDNSLKIISNASCTTNCLAPLAKVIHDNFGIVEGLMTTVHAITATQKTVDGPSGKLWRDGRGALQNIIPASTGAAKAVGKVIPELNGKLTGMAFRVPTANVSVVDLTCRLEKPAKYDDIKKVVKQASEGPLKGILGYTEHQVVSSDFNSDTHSSTFDAGAGIALNDHFVKLISWYDNEFGYSNRVVDLMAHMASKE

SEQ ID NO: 122 - protein, 609 aa, Homo sapiens [sequence omitted]

SEQ ID NO: 123 - protein, 250 aa, Homo sapiens [sequence omitted]

SEQ ID NO: 124 - protein, 1562 aa, Homo sapiens
MPGEAARAELLLPEADRPGPRTDLSCDAAAATTILGGDRREPCALTPGPSHLALTFLPSKPGARPQPEGASWDAGPGGAPSAWADPGEGGPSPMLLPEGLSSQALSTEAPLPATLEPRIVMGEETCQALLSPRAARTALRDQEGGHASPDPPPELCSQGDLSVPSPPPDPDSFFTPPSTPTKTTYALLPACGPHGDARDSEAELRDELLDSPPASPSGSYITADGDSWASSPSCSLSLLAPAEGLDFPSGWGLSPQGSMVDERELHPAGTPEPPSSESSLSADSSSSWGQEGHFFDLDFLANDPMIPAALLPFQGSLIFQVEAVEVTPLSPEEEEEEAVADPDPGGDLAGEGEEDSTSASFLQSLSDLSITEGMDEAFAFRDDTSAASSDSDSASYAEADDERLYSGEPHAQATLLQDSVQKTEEESGGGAKGLQAQDGTVSWAVEAAPQTSDRGAYLSQRQELISEVTEEGLALGQESTATVTPHTLQVAPGLQVEVATRVTPQAGEEETDSTAGQESAAMAMPQPSQEGISEILGQESVTAEKLPTPQEETSLTLCPDSPQNLKEEGGLDLPSGRKPVAAATIVPRQAKEDLTLPQDSAMTPPLPLQDTDLSSAPKPVAAATIVSQQAEEGLTLPQDSVMTPPLPLQDTELSSAPKPVAAATLVSQQAEEGLTLPQDSAMTPPLPLQDTDLSSAPKPVAAATLVSQQAEEGLTLPQDSAMTPPLPLQDTDLSSAPKPVAAATLVSQQAEEGLTLPQDSAMTPPLPLQDTDLSSAPKPVAAATIVSQQAEEGLTLPQDSAMTPPLPLQDTDLSSAPKPVAAATIVSQQAEEGLTLPQDSAMTPPLPLQDTDLSSAPKPVAAATPVSQQAEEGLTLPQDSAMTPPLPLQDTDLSSAPKPVAAATPVSQQAEEGLTLPQDSAMTAPLPLQDTGPTSGPEPLAVATPQTLQAEAGCAPGTEPVATMAQQEVGEALGPRPAPEEKNAALPTVPEPAALDQVQQDDPQPAAEAGTPWAAQEDADSTLGMEALSLPEPASGAGEEIAEALSRPGREACLEARAHTGDGAKPDSPQKETLEVENQQEGGLKLLAQEHGPRSALGGAREVPDAPPAACPEVSQARLLSPAREERGLSGKSTPEPTLPSAVATEASLDSCPESSVGAVSSLDRGCPDAPAPTSAPTSQQPEPVLGLGSVEQPHEVPSVLGTPLLQPPENLAKGQPSTPVDRPLGPDPSAPGTLAGAALPPLEPPAPCLCQDPQEDSVEDEEPPGSLGLPPPQAGVQPAAAAVSGTTQPLGTGPRVSLSPHSPLLSPKVASMDAKDLALQILPPCQVPPPSGPQSPAGPQGLSAPEQQEDEDSLEEDSPRALGSGQHSDSHGESSAELDEQDILAPQTVQCPAQAPAGGSEETIAKAKQSRSEKKARKAMSKLGLRQIQGVTRITIQKSKNILFVIAKPDVFKSPASDTYVVFGEAKIEDLSQQVHKAAAEKFKVPSEPSALVPESAPRPRVRLECKEEEEEEEEEVDEAGLELRDIELVMAQANVSRAKAVRALRDNHSDIVNAIMELTM

SEQ ID NO: 125 - protein, 427 aa, Homo sapiens
MAVLAALLRSGARSRSPLLRRLVQEIRYVERSYVSKPTLKEVVIVSATRTPIGSFLGSLSLLPATKLGSIAIQGAIEKAGIPKEEVKEAYMGNVLQGGEGQAPTRQAVLGAGLPISTPCTTINKVCASGMKAIMMASQSLMCGHQDVMVAGGMESMSNVPYVMNRGSTPYGGVKLEDLIVKDGLTDVYNKIHMGSCAENTAKKLNIARNEQDAYAINSYTRSKAAWEAGKFGNEVIPVTVTVKGQPDVVVKEDEEYKRVDFSKVPKLKTVFQKENGTVTAANASTLNDGAAALVLMTADAAKRLNVTPLARIVAFADAAVEPIDFPIAPVYAASMVLKDVGLKKEDIAMWEVNEAFSLVVLANIKMLEIDPQKVNINGGAVSLGHPIGMSGARIVGHLTHALKQGEYGLASICNGGGGASAMLIQKL

SEQ ID NO: 126 - protein, 711 aa, Homo sapiens
MSDYSTGGPPPGPPPPAGGGGGAGGAGGGPPPGPPGAGDRGGGGPGGGGPGGGSAGGPSQPPGGGGPGIRKDAFADAVQRARQIAAKIGGDAATTVNNSTPDFGFGGQKRQLEDGDQPESKKLASQGDSISSQLGPIHPPPRTSMTEEYRVPDGMVGLIIGRGGEQINKIQQDSGCKVQISPDSGGLPERSVSLTGAPESVQKAKMMLDDIVSRGRGGPPGQFHDNANGGQNGTVQEIMIPAGKAGLVIGKGGETIKQLQERAGVKMILIQDGSQNTNVDKPLRIIGDPYKVQQACEMVMDILRERDQGGFGDRNEYGSRIGGGIDVPVPRHSVGVVIGRSGEMIKKIQNDAGVRIQFKQDDGTGPEKIAHIMGPPDRCEHAARIINDLLQSLRSGPPGPPGGPGMPPGGRGRGRGQGNWGPPGGEMTFSIPTHKCGLVIGRGGENVKAINQQTGAFVEISRQLPPNGDPNFKLFIIRGSPQQIDHAKQLIEEKIEGPLCPVGPGPGGPGPAGPMGPFNPGPFNQGPPGAPPHAGGPPPHQYPPQGWGNTYPQWQPPAPHDPSKAAAAAADPNAAWAAYYSHYYQQPPGPVPGPAPAPAAPPAQGEPPQPPPTGQSDYTKAWEEYYKKIGQQPQQPGAPPQQDYTKAWEEYYKKQAQVATGGGPGAPPGSQPDYSAAWAEYYRQQAAYYGQTPGPGGPQPPPTQQGQQQAQ

SEQ ID NO: 127 - protein, 140 aa, Homo sapiens; identical to SEQ ID NO: 96

SEQ ID NO: 128 - protein, 241 aa, Homo sapiens
MAEEQPQVELFVKAGSDGAKIGNCPFSQRLFMVLWLKGVTFNVTTVDTKRRTETVQKLCPGGQLPFLLYGTEVHTDTNKIEEFLEAVLCPPRYPKLAALNPESNTAGLDIFAKFSAYIKNSNPALNDNLEKGLLKALKVLDNYLTSPLPEEVDETSAEDEGVSQRKFLDGNELTLADCNLLPKLHIVQVVCKKYRGFTIPEAFRGVHRYLSNAYAREEFASTCPDDEEIELAYEQVAKALK

SEQ ID NO: 129 - protein, 1677 aa, Homo sapiens
MEVPEPTCPAPPARDQPAPTPGPPGAPGGQASPHLTLGPVLLPPEQGLAPPTVFLKALPIPLYHTVPPGGLQPRAPLVTGSLDGGNVPFILSPVLQPEGPGPTQVGKPAAPTLTVNIVGTLPVLSPGLGPTLGSPGKVRNAGKYLCPHCGRDCLKPSVLEKHIRSHTGERPFPCATCGIAFKTQSNLYKHRRTQTHLNNSRLSSESEGAGGGLLEEGDKAGEPPRPEGRGESRCQGMHEGASERPLSPGAHVPLLAKNLDVRTEAAPCPGSAFADREAPWDSAPMASPGLPAASTQPWRKLPEQKSPTAGKPCALQRQQATAAEKPWDAKAPEGRLRKCESTDSGYLSRSDSAEQPHAPCSPLHSLSEHSAESEGEGGPGPGPGVAGAEPGAREAGLELEKKRLEERIAQLISHNQAVVDDAQLDNVRPRKTGLSKQGSIDLPTPYTYKDSFHFDIRALEPGRRRAPGPVRSTWTPPDKSRPLFFHSVPTQLSTTVECVPVTRSNSLPFVEGSRTWLEPREPRDPWSRTQKPLSPRPGPARLGCRSGLSSTDVPSGHPRALVRQAAVEDLPGTPIGDALVPAEDTDAKRTAAREAMAGKGRAGGRKCGQRRLKMFSQEKWQVYGDETFKRIYQKMKASPHGGKKAREVGMGSGAELGFPLQKEAAGSSGTVPTQDRRTPVHEDISAGATPEPWGNPPALEASLVTEPTKHGETVARRGDSDRPRVEEAVSSPALGGRDSPCSGSRSPLVSPNGRLELGWQMPPAPGPLKGGDVEAPRPVWPDPKLEGGARGVGDVQETCLWAQTVLRWPSRGSGEDKLPSERKKLKVEDLHSWKQPEPVSAETPGGPTQPASLSSQKQDADPGEVPGGSKESARQVGEPLESSGASLAAASVALKRVGPRDKATPLHPAAPAPAEHPSLATPPQAPRVLSALADNAFSPKYLLRLPQAETPLPLPIPWGPRHSQDSLCSSGWPEERASFVGSGLGTPLSPSPASGPSPGEADSILEDPSCSRPQDGRKGAQLGGDKGDRMATSRPAARELPISAPGAPREATSSPPTPTCEAHLVQDMEGDSHRIHRLCMGSTLARARLSGDVLNPWVPNWELGEPPGNAPEDPSSGPLVGPDPCSPLQPGSFLTALTRPQGVPPGWPELALSSHSGTSRSHSTRSPHSTQNPFPSLKAEPRLTWCCLSRSVPLPAEQKAKAASVYLAVHFPGSSLRDEGPNGPPGSNGGWTWTSPGEGGPAQMSKFSYPTVPGVMPQHQVSEPEWKKGLPWRAKMSRGNSKQRKLKINPKRYKGNFLQSCVQLRASRLRTPTWVRRRSRHPPALEGLKPCRTPGQTSSEIAGLNLQEEPSCATSESPPCCGKEEKKEGDCRQTLGTLSLGTSSRIVREMDKRTVKDISPSAGEHGDCTTHSTAATSGLSLQSDTCLAVVNDVPLPPGKGLDLGLLETQLLASQDSVSTDPKPYIFSDAQRPSSFGSKGTFPHHDIATSVAAVCISLPVRTDHIAQEIHSAESRDHSQTAGRTLTSSSPDSKVTEEGRAQTLLPGRPSSGQRISDSVPLESTEKTHLEIPASGPSSASSHHKEGRHKTFFPSRGQYGCGEMTVPCPSLGSDGRKRQVSGLITRKDSVVPSKPEQPIEIPEAPSKSLKKRSLEGMRKQTRVEFSDTSSDDEDRLVIEI

SEQ ID NO: 130 - protein, 803 aa, Homo sapiens
MRALWVLGLCCVLLTFGSVRADDEVDVDGTVEEDLGKSREGSRTDDEVVQREEEAIQLDGLNASQIRELREKSEKFAFQAEVNRMMKLIINSLYKNKEIFLRELISNASDALDKIRLISLTDENALSGNEELTVKIKCDKEKNLLHVTDTGVGMTREELVKNLGTIAKSGTSEFLNKMTEAQEDGQSTSELIGQFGVGFYSAFLVADKVIVTSKHNNDTQHIWESDSNEFSVIADPRGNTLGRGTTITLVLKEEASDYLELDTIKNLVKKYSQFINFPIYVWSSKTETVEEPMEEEEAAKEEKEESDDEAAVEEEEEEKKPKTKKVEKTVWDWELMNDIKPIWQRPSKEVEEDEYKAFYKSFSKESDDPMAYIHFTAEGEVTFKSILFVPTSAPRGLFDEYGSKKSDYIKLYVRRVFITDDFHDMMPKYLNFVKGVVDSDDLPLNVSRETLQQHKLLKVIRKKLVRKTLDMIKKIADDKYNDTFWKEFGTNIKLGVIEDHSNRTRLAKLLRFQSSHHPTDITSLDQYVERMKEKQDKIYFMAGSSRKEAESSPFVERLLKKGYEVIYLTEPVDEYCIQALPEFDGKRFQNVAKEGVKFDESEKTKESREAVEKEFEPLLNWMKDKALKDKIEKAVVSQRLTESPCALVASQYGWSGNMERIMKAQAYQTGKDISTNYYASQKKTFEINPRHPLIRDMLRRIKEDEDDKTVLDLAVVLFETATLRSGYLLPDTKAYGDRIERMLRLSLNIDPDAKVEEEPEEEPEETAEDTTEDTEQDEDEEMDVGTDEEEETAKESTAEKDEL

SEQ ID NO: 131 - protein, 165 aa, Homo sapiens
MLMPKKNRIAIYELLFKEGVMVAKKDVHMPKHPELADKNVPNLHVMKAMQSLKSRGYVKEQFAWRHFYWYLTNEGIQYLRDYLHLPPEIVPATLRRSRPETGRPRPKGLEGERPARLTRGEADRDTYRRSAVPPGADKKAEAGAGSATEFQFRGGFGRGRGQPPQ

SEQ ID NO: 132 - protein, 164 aa, Homo sapiens
MHRDSCPLDCKVYVGNLGNNGNKTELERAFGYYGPLRSVWVARNPPGFAFVEFEDPRDAADAVRELDGRTLCGCRVRVELSNGEKRSRNRGPPPSWGRRPRDDYRRRSPPPRRRSPRRRSFSRSRSRSLSRDRRRERSLSRERNHKPSRSFSRSRSRSRSNERK

SEQ ID NO: 133 - protein, 377 aa, Homo sapiens
MCEEEDSTALVCDNGSGLCKAGFAGDDAPRAVFPSIVGRPRHQGVMVGMGQKDSYVGDEAQSKRGILTLKYPIEHGIITNWDDMEKIWHHSFYNELRVAPEEHPTLLTEAPLNPKANREKMTQIMFETFNVPAMYVAIQAVLSLYASGRTTGIVLDSGDGVTHNVPIYEGYALPHAIMRLDLAGRDLTDYLMKILTERGYSFVTTAEREIVRDIKEKLCYVALDFENEMATAASSSSLEKSYELPDGQVITIGNERFRCPETLFQPSFIGMESAGIHETTYNSIMKCDIDIRKDLYANNVLSGGTTMYPGIADRMQKEITALAPSTMKIKIIAPPERKYSVWIGGSILASLSTFQQMWISKQEYDEAGPSIVHRKCF

SEQ ID NO: 134 - protein, 1980 aa, Homo sapiens
MAARLLAPPGPDSFKPFTPESLANIERRIAESKLKKPPKADGSHREDDEDSKPKPNSDLEAGKSLPFIYGDIPQGLVAVPLEDFDPYYLTQKTFVVLNRGKTLFRFSATPALYILSPFNLIRRIAIKILIHSVFSMIIMCTILTNCVFMTFSNPPDWSKNVEYTFTGIYTFESLVKIIARGFCIDGFTFLRDPWNWLDFSVIMMAYITEFVNLGNVSALRTFRVLRALKTISVIPGLKTIVGALIQSVKKLSDVMILTVFCLSVFALIGLQLFMGNLRNKCVVWPINFNESYLENGTKGFDWEEYINNKTNFYTVPGMLEPLLCGNSSDAGQCPEGYQCMKAGRNPNYGYTSFDTFSWAFLALFRLMTQDYWENLYQLTLRAAGKTYMIFFVLVIFVGSFYLVNLILAVVAMAYEEQNQATLEEAEQKEAEFKAMLEQLKKQQEEAQAAAMATSAGTVSEDAIEEEGEEGGGSPRSSSEISKLSSKSAKERRNRRKKRKQKELSEGEEKGDPEKVFKSESEDGMRRKAFRLPDNRIGRKFSIMNQSLLSIPGSPFLSRHNSKSSIFSFRGPGRFRDPGSENEFADDEHSTVEESEGRRDSLFIPIRARERRSSYSGYSGYSQGSRSSRIFPSLRRSVKRNSTVDCNGVVSLIGGPGSHIGGRLLPEATTEVEIKKKGPGSLLVSMDQLASYGRKDRINSIMSVVTNTLVEELEESQRKCPPCWYKFANTFLIWECHPYWIKLKEIVNLIVMDPFVDLAITICIVLNTLFMAMEHHPMTPQFEHVLAVGNLVFTGIFTAEMFLKLIAMDPYYYFQEGWNIFDGFIVSLSLMELSLADVEGLSVLRSFRLLRVFKLAKSWPTLNMLIKIIGNSVGALGNLTLVLAIIVFIFAVVGMQLFGKSYKECVCKINQDCELPRWHMHDFFHSFLIVFRVLCGEWIETMWDCMEVAGQAMCLIVFMMVMVIGNLVVLNLFLALLLSSFSADNLAATDDDGEMNNLQISVIRIKKGVAWTKLKVHAFMQAHFKQREADEVKPLDELYEKKANCIANHTGADIHRNGDFQKNGNGTTSGIGSSVEKYIIDEDHMSFINNPNLTVRVPIAVGESDFENLNTEDVSSESDPEGSKDKLDDTSSSEGSTIDIKPEVEEVPVEQPEEYLDPDACFTEGCVQRFKCCQVNIEEGLGKSWWILRKTCFLIVEHNWFETFIIFMILLSSGALAFEDIYIEQRKTIRTILEYADKVFTYIFILEMLLKWTAYGFVKFFTNAWCWLDFLIVAVSLVSLIANALGYSELGAIKSLRTLRALRPLRALSRFEGMRVVVNALVGAIPSIMNVLLVCLIFWLIFSIMGVNLFAGKYHYCFNETSEIRFEIEDVNNKTECEKLMEGNNTEIRWKNVKINFDNVGAGYLALLQVATFKGWMDIMYAAVDSRKPDEQPKYEDNIYMYIYFVIFIIFGSFFTLNLFIGVIIDNFNQQKKKFGGQDIFMTEEQKKYYNAMKKLGSKKPQKPIPRPLNKIQGIVFDFVTQQAFDIVIMMLICLNMVTMMVETDTQSKQMENILYWINLVFVIFFTCECVLKMFALRHYYFTIGWNIFDFVVVILSIVGMFLADIIEKYFVSPTLFRVIRLARIGRILRLIKGAKGIRTLLFALMMSLPALFNIGLLLFLVMFIFSIFGMSNFAYVKHEAGIDDMFNFETFGNSMICLFQITTSAGWDGLLLPILNRPPDCSLDKEHPGSGFKGDCGNPSVGIFFFVSYIIISFLIVVNMYIAIILENFSVATEESADPLSEDDFETFYEIWEKFDPDATQFIEYCKLADFADALEHPLRVPKPNTIELIAMDLPMVSGDRIHCLDILFAFTKRVLGDSGELDILRQQMEERFVASNPSKVSYEPITTTLRRKQEEVSAVVLQRAYRGHLARRGFICKKTTSNKLENGGTHREKKESTPSTASLPSYDSVTKPEKEKQQRAEEGRRERAKRQKEVRESKC

SEQ ID NO: 135 - protein, 355 aa, Homo sapiens; identical to SEQ ID NO: 44

SEQ ID NO: 136 - protein, 541 aa, Homo sapiens
MASMGTLAFDEYGRPFLIIKDQDRKSRLMGLEALKSHIMAAKAVANTMRTSLGPNGLDKMMVDKDGDVTVTNDGATILSMMDVDHQIAKLMVELSKSQDDEIGDGTTGVVVLAGALLEEAEQLLDRGIHPIRIADGYEQAARVAIEHLDKISDSVLVDIKDTEPLIQTAKTTLGSKVVNSCHRQMAEIAVNAVLTVADMERRDVDFELIKVEGKVGGRLEDTKLIKGVIVDKDFSHPQMPKKVEDAKIAILTCPFEPPKPKTKHKLDVTSVEDYKALQKYEKEKFEEMIQQIKETGANLAICQWGFDDEANHLLLQNNLPAVRWVGGPEIELIAIATGGRIVPRFSELTAEKLGFAGLVQEISFGTTKDKMLVIEQCKNSRAVTIFIRGGNKMIIEEAKRSLHDALCVIRNLIRDNRVVYGGGAAEISCALAVSQEADKCPTLEQYAMRAFADALEVIPMALSENSGMNPIQTMTEVRARQVKEMNPALGIDCLHKGTNDMKQQHVIETLIGKKQQISLATQMVRMILKIDDIRKPGESEE

SEQ ID NO: 137 - protein, 458 aa, Homo sapiens [sequence omitted]

SEQ ID NO: 138 - protein, 346 aa, Homo sapiens
MPSPLALRPYLRSEFSPSVDARPCSSPSELPAKLLLGATLPRAPRLPRRLAWCSIDWEQVCLLQRLGAGGFGSVYKATYRGVPVAIKQVNKCTKNRLASRRSFWAELNVARLRHDNIVRVVAASTRTPAGSNSLGTIIMEFGGNVTLHQVIYGAAGHPEGDAGEPHCRTGGQLSLGKCLKYSLDVVNGLLFLHSQSIVHLDLKPANILISEQDVCKISDFGCSEKLEDLLCFQTPSYPLGGTYTHRAPELLKGEGVTPKADIYSFAITLWQMTTKQAPYSGERQHILYAVVAYDLRPSLSAAVFEDSLPGQRLGDVIQRCWRPSAAQRPSARLLLVDLTSLKAELG

SEQ ID NO: 139 - protein, 726 aa, Homo sapiens
MSEETVPEAASPPPPQGQPYFDRFSEDDPEYMRLRNRAADLRQDFNLMEQKKRVTMILQSPSFREELEGLIQEQMKKGNNSSNIWALRQIADFMASTSHAVFPTSSMNVSMMTPINDLHTADSLNLAKGERLMRCKISSVYRLLDLYGWAQLSDTYVTLRVSKEQDHFLISPKGVSCSEVTASSLIKVNILGEVVEKGSSCFPVDTTGFCLHSAIYAARPDVRCIIHLHTPATAAVSAMKWGLLPVSHNALLVGDMAYYDFNGEMEQEADRINLQKCLGPTCKILVLRNHGVVALGDTVEEAFYKIFHLQAACEIQVSALSSAGGVENLILLEQEKHRPHEVGSVQWAGSTFGPMQKSRLGEHEFEALMRMLDNLGYRTGYTYRHPFVQEKTKHKSEVEIPATVTAFVFEEDGAPVPALRQHAQKQQKEKTRWLNTPNTYLRVNVADEVQRSMGSPRPKTTWMKADEVEKSSSGMPIRIENPNQFVPLYTDPQEVLEMRNKIREQNRQDVKSAGPQSQLLASVIAEKSRSPSTESQLMSKGDEDTKDDSEETVPNPFSQLTDQELEEYKKEVERKKLELDGEKETAPEEPGSPAKSAPASPVQSPAKEAETKSPLVSPSKSLEEGTKKTETSKAATTEPETTQPEGVVVNGREEEQTAEEILSKGLSQMTTSADTDVDTSKDKTESVTSGPMSPEGSPSKSPSKKKKKFRTPSFLKKSKKKEKVES

SEQ ID NO: 140 - protein, 317 aa, Homo sapiens [sequence omitted]

SEQ ID NO: 141 - protein, 601 aa, Homo sapiens
MAEPSGAETRPPIRVTVKTPKDKEEIVICDRASVKEFKEEISRRFKAQQDQLVLIFAGKILKDGDTLNQHGIKDGLTVHLVIKTPQKAQDPAAATASSPSTPDPASAPSTTPASPATPAQPSTSGSASSDAGSGSRRSSGGGPSPGAGEGSPSATASILSGFGGILGLGSLGLGSANFMELQQQMQRQLMSNPEMLSQIMENPLVQDMMSNPDLMRHMIMANPQMQQLMERNPEISHMLNNPELMRQTMELARNPAMMQEMMRNQDRALSNLESIPGGYNALRRMYTDIQEPMFSAAREQFGNNPFSSLAGNSDSSSSQPLRTENREPLPNPWSPSPPTSQAPGSGGEGTGGSGTSQVHPTVSNPFGINAASLGSGMFNSPEMQALLQQISENPQLMQNVISAPYMRSMMQTLAQNPDFAAQMMVNVPLFAGNPQLQEQLRLQLPVFLQQMQNPESLSILTNPRAMQALLQIQQGLQTLQTEAPGLVPSLGSFGISRTPAPSAGSNAGSTPEAPTSSPATPATSSPTGASSAQQQLMQQMIQLLAGSGNSQVQTPEVRFQQQLEQLNSMGFINREANLQALIATGGDINAAIERLLGSQLS

SEQ ID NO: 142 - protein, 158 aa, Homo sapiens [sequence omitted]

SEQ ID NO: 143 - protein, 1946 aa, Homo sapiens
MVESCLLTFRAFFWWIALIKMDLSDLGEAAAFLRRSEAELLLLQATALDGKKKCWIPDGENAYIEAEVKGSEDDGTVIVETADGESLSIKEDKIQQMNPPEFEMIEDMAMLTHLNEASVLHTLKRRYGQWMIYTYSGLFCVTINPYKWLPVYQKEVMAAYKGKRRSEAPPHIFAVANNAFQDMLHNRENQSILFTGESGAGKTVNSKHIIQYFATIAAMIESRKKQGALEDQIMQANTILEAFGNAKTLRNDNSSRFGKFIRMHFGARGMLSSVDIDIYLLEKSRVIFQQAGERNYHIFYQILSGQKELHDLLLVSANPSDFHFCSCGAVTVESLDDAEELLATEQAMDILGFLPDEKYGCYKLTGAIMHFGNMKFKQKPREEQLEADGTENADKAAFLMGINSSELVKCLIHPRIKVGNEYVTRGQTIEQVTCAVGALSKSMYERMFKWLVARINRALDAKLSRQFFIGILDITGFEILEYNSLEQLCINFTNEKLQQFFNWHMFVLEQEEYKKESIEWVSIGFGLDLQACIDLIEKPMGILSILEEECMFPKATDLTFKTKLFDNHFGKSVHLQKPKPDKKKFEAHFELVHYAGVVPYNISGWLEKNKDLLNETVVAVFQKSSNRLLASLFENYMSTDSAIPFGEKKRKKGASFQTVASLHKENLNKLMTNLKSTAPHFVRCINPNVNKIPGILDPYLVLQQLRCNGVLEGTRICREGFPNRLQYADFKQRYCILNPRTFPKSKFVSSRKAAEELLGSLEIDHTQYRFGITKVFFKAGFLGQLEAIRDERLSKVFTLFQARAQGKLMRIKFQKILEERDALILIQWNIRAFMAVKNWPWMRLFFKIKPLVKSSEVGEEVAGLKEECAQLQKALEKSEFQREELKAKQVSLTQEKNDLILQLQAEQETLANVEEQCEWLIKSKIQLEARVKELSERVEEEEEINSELTARGRKLEDECFELKKEIDDLETMLVKSEKEKRTTEHKVKNLTEEVEFLNEDISKLNRAAKVVQEAHQQTLDDLHMEEEKLSSLSKANLKLEQQVDELEGALEQERKARMNCERELHKLEGNLKLNRESMENLESSQRHLAEELRKKELELSQMNSKVENEKGLVAQLQKTVKELQTQIKDLKEKLEAERTTRAKMERERADLTQDLADLNERLEEVGGSSLAQLEITKKQETKFQKLHRDMEEATLHFETTSASLKKRHADSLAELEGQVENLQQVKQKLEKDKSDLQLEVDDLLTRVEQMTRAKANAEKLCTLYEERLHEATAKLDKVTQLANDLAAQKTKLWSESGEFLRRLEEKEALINQLSREKSNFTRQIEDLRGQLEKETKSQSALAHALQKAQRDCDLLREQYEEEQEVKAELHRTLSKVNAEMVQWRMKYENNVIQRTEDLEDAKKELAIRLQEAAEAMGVANARNASLERARHQLQLELGDALSDLGKVRSAAARLDQKQLQSGKALADWKQKHEESQALLDASQKEVQALSTELLKLKNTYEESIVGQETLRRENKNLQEEISNLTNQVREGTKNLTEMEKVKKLIEEEKTEVQVTLEETEGALERNESKILHFQLELLEAKAELERKLSEKDEEIENFRRKQQCTIDSLQSSLDSEAKSRIEVTRLKKKMEEDLNEMELQLSCANRQVSEATKSLGQLQIQIKDLQMQLDDSTQLNSDLKEQVAVAERRNSLLQSELEDLRSLQEQTERGRRLSEEELLEATERINLFYTQNTSLLSQKKKLEADVARMQKEAEEVVQECQNAEEKAKKAAIEAANLSEELKKKQDTIAHLERTRENMEQTITDLQKRLAEAEQMALMGSRKQIQKLESRVRELEGELEGEIRRSAEAQRGARRLERCIKELTYQAEEDKKNLSRMQTQMDKLQLKVQNYKQQVEVAETQANQYLSKYKKQQHELNEVKERAEVAESQVNKLKIKAREFGKKVQEE

SEQ ID NO: 144 - protein, 228 aa, Homo sapiens
MLSRCRSGLLHVLGLSFLLQTRRPILLCSPRLMKPLVVFVLGGPGAGKGTQCARIVEKYGYTHLSAGELLRDERKNPDSQYGELIEKYIKEGKIVPVEITISLLKREMDQTMAANAQKNKFLIDGFPRNQDNLQGWNKTMDGKADVSFVLFFDCNNEICIERCLERGKSSGRSDDNRESLEKRIQTYLQSTKPIIDLYEEMGKVKKIDASKSVDEVFDEVVQIFDKEG

SEQ ID NO: 145 - protein, 313 aa, Homo sapiens
MNQLSFLLFLIATTRGWSTDEANTYFKEWTCSSSPSLPRSCKEIKDECPSAFDGLYFLRTENGVIYQTFCDMTSGGGGWTLVASVHENDMRGKCTVGDRWSSQQGSKAVYPEGDGNWANYNTFGSAEAATSDDYKNPGYYDIQAKDLGIWHVPNKSPMQHWRNSSLLRYRTDTGFLQTLGHNLFGIYQKYPVKYGEGKCWTDNGPVIPVVYDFGDAQKTASYYSPYGQREFTAGFVQFRVFNNERAANALCAGMRVTGCNTEHHCIGGGGYFPEASPQQCGDFSGFDWSGYGTHVGYSSSREITEAAVLLFYR

SEQ ID NO: 146 - protein, 244 aa, Homo sapiens
LEPYADQLRTQVNTQAEQLRRQLDPLAQRMERVLRENADSLQASLRPHADELKAKIDQNVEELKGRLTPYADEFKVKIDQTVEELRRSLAPYAQDTQEKLNHQLEGLTFQMKKNAEELKARISASAEELRQRLAPLAEDVRGNLKGNTEGLQKSLAELGGHLDQQVEEFRRRVEPYGENFNKALVQQMEQLRQKLGPHAGDVEGHLSFLEKDLRDKVNSFFSTFKEKESQDKTLSLPELEQQQE

SEQ ID NO: 147 - protein, 390 aa, Homo sapiens
MRKMLAAVSRVLSGASQKPASRVLVASRNFANDATFEIKKCDLHRLEEGPPVTTVLTREDGLKYYRMMQTVRRMELKADQLYKQKIIRGFCHLCDGQEACCVGLEAGINPTDHLITAYRAHGFTFTRGLSVREILAELTGRKGGCAKGKGGSMHMYAKNFYGGNGIVGAQVPLGAGIALACKYNGKDEVCLTLYGDGAANQGQIFEAYNMAALWKLPCIFICENNRYGMGTSVERAAASTDYYKRGDFIPGLRVDGMDILCVREATRFAAAYCRSGKGPILMELQTYRYHGHSMSDPGVSYRTREEIQEVRSKSDPIMLLKDRMVNSNLASVEELKEIDVEVRKEIEDAAQFATADPEPPLEELGYHIYSSDPPFEVRGANQWIKFKSVS

SEQ ID NO: 148 - protein, 307 aa, Homo sapiens; identical to SEQ ID NO: 56

SEQ ID NO: 149 - protein, 92 aa, Homo sapiens [sequence omitted]

SEQ ID NO: 150 - protein, 548 aa, Homo sapiens
MAAPPARADADPSPTSPPTARDTPGRQAEKSETACEDRSNAESLDRLLPPVGTGRSPRKRTTSQCKSEPPLLRTSKRTIYTAGRPPWYNEHGTQSKEAFAIGLGGGSASGKTTVARMIIEALDVPWVVLLSMDSFYKVLTEQQQEQAAHNNFNFDHPDAFDFDLIIFTLKKLKQGKSVKVPIYDFTTHSRKKDWKTLYGANVIIFEGIMAFADKTLLELLDMKIFVDTDSDIRLVRRLRRDISERGRDIEGVIKQYNKFVKPSFDQYIQPTMRLADIVVPRGSGNTVAIDLIVQHVHSQLEERELSVRAALASAHQCHPLPRTLSVLKSTPQVRGMHTIIRDKETSRDEFIFYSKRLMRLLIEHALSFLPFQDCVVQTPQGQDYAGKCYAGKQITGVSILRAGETMEPALRAVCKDVRIGTILIQTNQLTGEPELHYLRLPKDISDDHVILMDCTVSTGAAAMMAVRVLLDHDVPEDKIFLLSLLMAEMGVHSVAYAFPRVRIITTAVDKRVNDLFRIIPGIGNFGDRYFGTDAVPDGSDEEEVAYTG

SEQ ID NO: 151 - protein, 518 aa, Homo sapiens
MFLRAGLAALSPLLRSLRPSPVAAMSTGTFVVSQPLNYRGGARVEPADASGTEKAFEPATGRVIATFTCSGEKEVNLAVQNAKAAFKIWSQKSGMERCRILLEAARIIREREDEIATMECINNGKSIFEARLDIDISWQCLEYYAGLAASMAGEHIQLPGGSFGYTRREPLGVCVGIGAWNYPFQIASWKSAPALACGNAMVFKPSPFTPVSALLLAEIYSEAGVPPGLFNVVQGGAATGQFLCQHPDVAKVSFTGSVPTGMKIMEMSAKGIKPVTLELGGKSPLIIFSDCDMNNAVKGALMANFLTQGQVCCNGTRVFVQKEILDKFTEEVVKQTQRIKIGDPLLEDTRMGPLINRPHLERVLGFVKVAKEQGAKVLCGGDIYVPEDPKLKDGYYMRPCVLTNCRDDMTCVKEEIFGPVMSILSFDTEAEVLERANDTTFGLAAGVFTRDIQRAHRVVAELQAGTCFINNYNVSPVELPFGGYKKSGFGRENGRVTIEYYSQLKTVCVEMGDVESAF

SEQ ID NO: 152 - protein, 649 aa, Homo sapiens
  MISC_FEATURE (648)..(648): X can be any amino acid
MGCAEGKAVAAAAPTELQTKGKNGDGRRRSAKDHHPGKTLPENPAGFTSTATADSRALLQAYIDGHSVVIFSRSTCTRCTEVKKLFKSLCVPYFVLELDQTEDGRALEGTLSELAAETDLPVVFVKQRKIGGHGPTLKAYQEGRLQKLLKMNGPEDLPKSYDYDLIIIGGGSGGLAAAKEAAQYGKKVMVLDFVTPTPLGTRWGLGGTCVNVGCIPKKLMHQAALLGQALQDSRNYGWKVEETVKHDWDRMIEAVQNHIGSLNWGYRVALREKKVVYENAYGQFIGPHRIKATNNKGKEKIYSAERFLIATGERPRYLGIPGDKEYCISSDDLFSLPYCPGKTLVVGASYVALECAGFLAGIGLDVTVMVRSILLRGFDQDMANKIGEHMEEHGIKFIRQFVPIKVEQIEAGTPGRLRVVAQSTNSEEIIEGEYNTVMLAIGRDACTRKIGLETVGVKINEKTGKIPVTDEEQTNVPYIYAIGDILEDKVELTPVAIQAGRLLAQRLYAGSTVKCDYENVPTTVFTPLEYGACGLSEEKAVEKFGEENIEVYHSYFWPLEWTIPSRDNNKCYAKIICNTKDNERVVGFHVLGPNAGEVTQGFAAALKCGLTKKQLDSTIGIHPVCAEVFTTLSVTKRSGASILQAGCXG

SEQ ID NO: 153 - protein, 385 aa, Homo sapiens
MSKPAGSTSRILDIPCKVCGDRSSGKHYGVYACDGCSGFFKRSIRRNRTYVCKSGNQGGCPVDKTHRNQCRACRLKKCLEVNMNKDAVQHERGPRTSTIRKQVALYFRGHKEENGAAAHFPSAALPAPAFFTAVTQLEPHGLELAAVSTTPERQTLVSLAQPTPKYPHEVNGTPMYLYEVATESVCESAARLLFMSIKWAKSVPAFSTLSLQDQLMLLEDAWRELFVLGIAQWAIPVDANTLLAVSGMNGDNTDSQKLNKIISEIQALQEVVARFRQLRLDATEFACLKCIVTFKAVPTHSGSELRSFRNAAAIAALQDEAQLTLNSYIHTRYPTQPCRFGKLLLLLPALRSISPSTIEEVFFKKTIGNVPITRLLSDMYKSSDI

SEQ ID NO: 154 - protein, 398 aa, Homo sapiens
MSQHRHQRHSRVISSSPVDTTSVGFCPTFKKFKRNDDECRAFVKRVIMSRFFKIIMISTVTSNAFFMALWTSYDIRYRLFRLLEFSEIFFVSICTSELSMKVYVDPINYWKNGYNLLDVIIIIVMFLPYALRQLMGKQFTYLYIADGMQSLRILKLIGYSQGIRTLITAVGQTVYTVASVLLLLFLLMYIFAILGFCLFGSPDNGDHDNWGNLAAAFFTLFSLATVDGWTDLQKQLDNREFALSRAFTIIFILLASFIFLNMFVGVMIMHTEDSIRKFERELMLEQQEMLMGEKQVILQRQQEEISRLMHIQKNADCTSFSELVENFKKTLSHTDPMVLDDFGTSLPFIDIYFSTLDYQDTTVHKLQELYYEIVHVLSLMLEDLPQEKPQSLEKVDEK

SEQ ID NO: 155 - protein, 227 aa, Homo sapiens
MMAAGAALALALWLLMPPVEVGGAGPPPIQDGEFTFLLPAGRKQCFYQSAPANASLETEYQVIGGAGLDVDFTLESPQGVLLVSESRKADGVHTVEPTEAGDYKLCFDNSFSTISEKLVFFELIFDSLQDDEEVEGWAEAVEPEEMLDVKMEDIKESIETMRTRLERSIQMLTLLRAFEARDRNLQEGNLERVNFWSAVNVAVLLLVAVLQVCTLKRFFQDKRPVPT

SEQ ID NO: 156 - protein, 474 aa, Homo sapiens
MKTKCICELCSCGRHHCPHLPTKIYDETEKPCLLSEYTENYPFYHSYLPRESFKPRREYQKGSIPMEGLTTSRRDFGPHKVAPVKVHQYDQFVPSEENMDLLTTYKKDYNPYPVCRVDPIKPRDSKYPCSDKMECLPTYKADYLPWNQPRREPLRLEHKYQPASVRFDNRTTHQDDYPIKGLVKTISCKPLAMPKLCNIPLEDVTNYKMSYVAHPVEKRFVHEAEKFRPCEIPFESLTTQKQSYRGLMGEPAKSLKPLARPPGLDMPFCNTTEFRDKYQAWPMPRMFSKAPITYVPPEDRMDLLTTVQAHYTCPKGAPAQSCRPALQIKKCGRFEGSSTTKDDYKQWSSMRTEPVKPVPQLDLPTEPLDCLTTTRAHYVPHLPINTKSCKPHWSGPRGNVPVESQTTYTISFTPKEMGRCLASYPEPPGYTFEEVDALGHRIYKPVSQAGSQQSSHLSVDDSENPNQRELEVLA

SEQ ID NO: 157 - protein, 1120 aa, Homo sapiens
MAEAPPVSGTFKFNTDAAEFIPQEKKNSGLNCGTQRRLDSNRIGRRNYSSPPPCHLSRQVPYDEISAVHQHSYHPSGSKPKSQQTSFQSSPCNKSPKSHGLQNQPWQKLRNEKHHIRVKKAQSLAEQTSDTAGLESSTRSESGTDLREHSPSESEKEVVGADPRGAKPKKATQFVYSYGRGPKVKGKLKCEWSNRTTPKPEDAGPESTKPVGVFHPDSSEASSRKGVLDGYGARRNEQRRYPQKRPPWEVEGARPRPGRNPPKQEGHRHTNAGHRNNMGPIPKDDLNERPAKSTCDSENLAVINKSSRRVDQEKCTVRRQDPQVVSPFSRGKQNHVLKNVETHTGSLIEQLTTEKYECMVCCELVRVTAPVWSCQSCYHVFHLNCIKKWARSPASQADGQSGWRCPACQNVSAHVPNTYTCFCGKVKNPEWSRNEIPHSCGEVCRKKQPGQDCPHSCNLLCHPGPCPPCPAFMTKTCECGRTRHTVRCGQAVSVHCSNPCENILNCGQHQCAELCHGGQCQPCQIILNQVCYCGSTSRDVLCGTDVGKSDGFGDFSCLKICGKDLKCGNHTCSQVCHPQPCQQCPRLPQLVRCCPCGQTPLSQLLELGSSSRKTCMDPVPSCGKVCGKPLPCGSLDFIHTCEKLCHEGDCGPCSRTSVISCRCSFRTKELPCTSLKSEDATFMCDKRCNKKRLCGRHKCNEICCVDKEHKCPLICGRKLRCGLHRCEEPCHRGNCQTCWQASFDELTCHCGASVIYPPVPCGTRPPECTQTCARVHECDHPVYHSCHSEEKCPPCTFLTQKWCMGKHEFRSNIPCHLVDISCGLPCSATLPCGMHKCQRLCHKGECLVDEPCKQPCTTPRADCGHPCMAPCHTSSPCPVTACKAKVELQCECGRRKEMVICSEASSTYQRIAAISMASKITDMQLGGSVEISKLITKKEVHQARLECDEECSALERKKRLAEAFHISEDSDPFNIRSSGSKFSDSLKEDARKDLKFVSDVEKEMETLVEAVNKGKNSKKSHSFPPMNRDHRRIIHDLAQVYGLESVSYDSEPKRNVVVTAIRGKSVCPPTTLTGVLEREMQARPPPPIPHHRHQSDKNPGSSNLQKITKEPIIDYFDVQD

We claim:

1. A method of detecting cancer or a predisposition to developing cancer in a subject, comprising determining an expression level of a cancer-associated protein, polypeptide or polynucleotide selected from the group consisting of myeloblastin precursor (e.g., SEQ ID NO:29); Titin; HBA1; Insulin-like growth factor 1 receptor (IGF1R); Isoform 3 of zonadhesin precursor; latent transforming growth factor beta binding protein 4 (LTBP4); ASXL1 (additional sex combs like 1); beta globin (HBB); BMP15-bone morphogenetic protein; TRIM49; DNAJ homolog subfamily B member 11 precursor; uncharacterized hematopoietic stem/progenitor cells protein MDS027; uncharacterized protein ALB; isoform 3 of sushi, nidogen and EGF-like domain-containing protein 1 precursor; isoform 2 of peripherin; mitochondrial 28S ribosomal protein S22; translation initiation factor EIF-2B subunit epsilon; estradiol 17-beta-dehydrogenase 1; XRCC6BP1; brain-specific angiogenesis inhibitor 1 precursor; isoform 2 of ring finger and CCCH-type zinc finger domain-containing protein 2; hemoglobin subunit beta; isoform 1 of far upstream element-binding protein 1; GALECTIN-3; lysozyme C precursor; actin, alpha skeletal muscle; isoform M2 of pyruvate kinase isozymes M1/M2; AGR2; neutrophil defensin 1 precursor; uncharacterized protein PSME2; tubulin beta-2C chain; thiosulfate sulfurtransferase; heat shock 70 kDa protein 1; Ig kappa chain V-III region sie; macrophage migration inhibitory factor; isoform 1 of ATP synthase subunit D, mitochondrial; uncharacterized protein ENSP00000374051; isocitrate dehydrogenase [NADP] cytoplasmic; hemoglobin subunit delta; isoform 1 of splicing factor, arginine/serine-rich 7; isoform 1 of mRNA-capping enzyme; LON protease homolog, mitochondrial precursor; signal recognition particle 54 kDa protein; isoform long of galectin-9; integrin-linked protein kinase; bifunctional aminoacyl-tRNA synthetase; isoform 1 of zinc finger protein 207; inorganic pyrophosphatase; calponin-2; isoform 1 of muscleblind-like protein 3; cathepsin G precursor; zinc finger and BTB domain-containing protein 34; adenine phosphoribosyltransferase; 40S ribosomal protein S9; TALIN-1; leucine-rich repeat-containing protein 59; ATP synthase subunit alpha, mitochondrial precursor; isoform 7 of protein transport protein SEC31A; dihydroxyacetone kinase; protein similar to heterogeneous nuclear ribonucleoproteins C1/C2 (HNRNP C1/HNRNP C2) isoform 4; 18 kDa protein (e.g., UNIPARC Accession Number IP100796554; cold agglutinin FS-1 L-chain; isoform 1 of heterogeneous nuclear ribonucleoprotein d0; DAZAP1/MEF2D fusion protein; POTE2; Keratin 18 (KRT18); PSME4 Isoform 1 of Proteasome activator complex subunit; Mitogen-activated protein kinase-activated protein kinase (MAPKAPK33); Complement component 1, s subcomponent (C1S); Lysozyme C precursor (LYZ); Keritin Type Cytoskeletal 20 (KRT20); RNASE3; Aldehyde dehydrogenase X, mitochondrial precursor (ALDH1B1); CDNA FLJ25506 fis, clone CBR05185; Isoform B of fibulin-1 precursor (FBLN1); Nucleobindin 1 (NUCB1); Histone cluster 2, H2ba (HIST2H2BA); Tripartite motif-containing 28 (TRIM28); Peroxisomal D3, D2 enoyl-CoA isomerase (PECI); Peptidylprolyl isomerase B (PPIB); Similar to 40S ribosomal protein S17; Eukaryotic translation elongation factor 1 gamma (EEF1G); Keratin 8 (KRT8); Fibulin 2 (FBLN2); VIM; Fibrinogen alpha chain (FGA); Annexin A2 (ANXA2); H2A histone family, member J (H2AFJ); Actin alpha, cardiac muscle 1 (ACTC1); Keratin 19 (KRT19); Immunoglobin lambda locus (IGL@protein); Immunoglobulin heavy constant mu (IGHM); EGF-containing fibulin-like extracellular matrix protein 1 (EFEMP1); Tripartite motif-containing protein 34; Isoform 3 of AP1-subunit Gamma Binding Protein 1; Proflin-1; Histone H4; Hemoglobin subunit alpha; Transgelin); Lumican precursor; Hemoglobin Beta; Fibrinogen Beta Chain Precursor; Immunoglobulin kappa constant (IGKC); Uncharacterized Protein ALB; ApoA1; C4A; C3 187 kDa protein; Actin, Cytoplasmic 1 (actin beta); Hemoglobin beta; Hemoglobin subunit alpha; POTE-2 alpha actin; SLC4A10; Ribonuclease P Protein Subunit P20 (POP7); Nuclear RNA export factor 1 (NXF1); UVEAL Autoantigen With Coiled-Coil Domains And Ankyrin Repeats, UACA; Uncharacterized Protein C13ORF27; Isoform 3 of Sushi, Nidogen And EGF-Like Domain-Containing Protein 1 Precursor; Isoform 1 Of Dynein Heavy Chain 10, Axonemal (DNAH10); Gap junction alpha-1 protein (GJA1/Connexion 43); Isoform 1 Of Kinesin-Like Protein KIF25 (KIF25); GAPDH-Glyceraldehyde-3-Phosphate Dehydrogenase; Uncharacterized Protein ALB; Galectin-3, LGALS3; Similar to NAC-Alpha Domain-Containing Protein 1 (NACAD); Acetyl-CoA Acetyltransferase, Mitochondrial, ACAT1; KH-Type Splicing Regulatory Protein, FUBP2; Profilin 1(PFN1); Chloride Intracellular Channel Protein 1, CLIC1; Zinc Finger Protein 831; Endoplasmin; Ribosomal Protein S10 (RPS10); Splicing Factor, Arginine/Serine-Rich 3; ACTA2 Protein (alpha actin, smooth muscle); Isoform 1 of Sodium Channel Protein Type 8 Subunit Alpha, SCN8A; Isoform Long of Galectin-9; T-Complex Protein 1 Subunit Epsilon, CCT5; Alpha-Enolase, Lung Specific; Proto-Oncogene Serine/Threonine-Protein Kinase MOS; Isoform 1 Of Beta-Adducin (ADD2); Apolipoprotein E (APOE); Ubiquilin-4 (UBQLN4) (ataxin-1 ubiquitin-like interacting protein); Sumo-Conjugating Enzyme UB21 (UBC9 homolog in yeast); Myosin-15 (MYH15); FLJ93091, Homo Sapiens UMP-CMP Kinase (UMP-CMPK); Intelectin-1 (ITLN1); Apolipoprotein A-IV (APOA4); Mitochondrial pyruvate dehydrogenase (lipoamide) alpha 1 (PDHA1); Leucine-Rich Repeat-Containing Protein 59 (LRRC59); 60S Ribosomal Protein L37A (RPL37A); Uridine-Cytidine Kinase 1-like 1 (UCKL1); Aldehyde Dehydrogenase 9A1 (ALDH9A1); Isoform 3 of Thioredoxin Reductase 1, Cytoplasmic (TXNRD1); Nuclear Receptor Subfamily 2 Group E Member 1 (NR2E1); Cation Channel Sperm-Associated Protein 3 (CATSPER3); Transmembrane EMP24 Domain-Containing Protein 1 (TMED1); Protein FAM154A (FAM154A); and Isoform 1 of Transcriptional Repressor NF-X1 (NFX1) or any combinations thereof; in a biological sample from the subject, wherein an increase of the expression level of the cancer-associated protein, polypeptide, or polynucleotide in the biological sample as compared to a control sample indicates that the subject has cancer or has a predisposition to developing cancer.

2. The method of claim 1, wherein the protein or polypeptide comprises an amino acid sequence set forth as SEQ ID NO:1-157.

3. The method of claim 1, wherein the cancer is colorectal cancer.

4. The method of claim 1, wherein the method further comprises determining the expression level of two or more of the cancer-associated proteins, polypeptides, or polynucleotides.

5. The method of claim 1, wherein the expression level of the cancer-associated polynucleotide, polypeptide or protein is determined by a method selected from group consisting of: (a) detecting the presence or amount of the polypeptide, protein, or polynucleotide, (b) detecting mRNA of the cancer-associated polynucleotide, and (c) detecting the biological activity of the protein or polypeptide encoded by the cancer-associated polynucleotide.

6. The method of claim 1, wherein the biological sample comprises cells, cell extracts, tissue, bodily fluid, bodily fluid substantially lacking cells, serum, urine, tears, milk, seminal fluid, prostatic fluid, lung lavage fluid, saliva, mucosal cells, tumor cells, cancer cells, a biopsy sample, a lavage sample, a sputum sample, a serum sample, a plasma sample, a blood sample, a fecal sample, a lymph node sample, a bone marrow sample, a urine sample, a tissue sample, a colorectal tissue sample, or a pleural effusion sample.

7. The method of claim 5, wherein the expression level of the cancer-associated protein or polypeptide is determined by detecting the level of the polypeptide expression in the sample using an antibody or antigen-binding fragment thereof that specifically binds to the polypeptide.

8. An isolated antibody, or antigen-binding fragment thereof, that specifically binds to a protein or polypeptide selected from the group consisting of Titin; HBA1; Insulin-like growth factor 1 receptor (IGF1R); Isoform 3 of zonadhesin precursor; latent transforming growth factor beta binding protein 4 (LTBP4); ASXL1 (additional sex combs like 1); beta globin (HBB); BMP15-bone morphogenetic protein; TRIM49; DNAJ homolog subfamily B member 11 precursor; uncharacterized hematopoietic stem/progenitor cells protein MDS027; uncharacterized protein ALB; isoform 3 of sushi, nidogen and EGF-like domain-containing protein 1 precursor; isoform 2 of peripherin; mitochondrial 28S ribosomal protein S22; translation initiation factor EIF-2B subunit epsilon; estradiol 17-beta-dehydrogenase 1; XRCC6BP1; brain-specific angiogenesis inhibitor 1 precursor; isoform 2 of ring finger and CCCH-type zinc finger domain-containing protein 2; hemoglobin subunit beta; isoform 1 of far upstream element-binding protein 1; GALECTIN-3; lysozyme C precursor; actin, alpha skeletal muscle; isoform M2 of pyruvate kinase isozymes M1/M2; AGR2; neutrophil defensin 1 precursor; myeloblastin precursor; uncharacterized protein PSME2; tubulin beta-2C chain; thiosulfate sulfurtransferase; heat shock 70 kDa protein 1; Ig kappa chain V-III region sie; macrophage migration inhibitory factor; isoform 1 of ATP synthase subunit D, mitochondrial; uncharacterized protein ENSP00000374051; isocitrate dehydrogenase [NADP] cytoplasmic; hemoglobin subunit delta; isoform 1 of splicing factor, arginine/serine-rich 7; isoform 1 of mRNA-capping enzyme; LON protease homolog, mitochondrial precursor; signal recognition particle 54 kDa protein; isoform long of galectin-9; integrin-linked protein kinase; bifunctional aminoacyl-tRNA synthetase; isoform 1 of zinc finger protein 207; inorganic pyrophosphatase; calponin-2; isoform 1 of muscleblind-like protein 3; cathepsin G precursor; zinc finger and BTB domain-containing protein 34; adenine phosphoribosyltransferase; 40S ribosomal protein S9; TALIN-1; leucine-rich repeat-containing protein 59; ATP synthase subunit alpha, mitochondrial precursor; isoform 7 of protein transport protein SEC31A; dihydroxyacetone kinase; protein similar to heterogeneous nuclear ribonucleoproteins C1/C2 (HNRNP C1/HNRNP C2) isoform 4; 18 kDa protein (e.g., UNIPARC Accession Number IP100796554; cold agglutinin FS-1 L-chain; isoform 1 of heterogeneous nuclear ribonucleoprotein d0; DAZAP1/MEF2D fusion protein; POTE2; Keratin 18 (KRT18); PSME4 Isoform 1 of Proteasome activator complex subunit; Mitogen-activated protein kinase-activated protein kinase (MAPKAPK33); Complement component 1, s subcomponent (C1S); Lysozyme C precursor (LYZ); Keritin Type Cytoskeletal 20 (KRT20); RNASE3; Aldehyde dehydrogenase X, mitochondrial precursor (ALDH1B1); CDNA FLJ25506 fis, clone CBR05185; Isoform B of fibulin-1 precursor (FBLN1); Nucleobindin 1 (NUCB1); Histone cluster 2, H2ba (HIST2H2BA); Tripartite motif-containing 28 (TRIM28); Peroxisomal D3, D2 enoyl-CoA isomerase (PECI); Peptidylprolyl isomerase B (PPIB); Similar to 40S ribosomal protein S17; Eukaryotic translation elongation factor 1 gamma (EEF1G); Keratin 8 (KRT8); Fibulin 2 (FBLN2); VIM; Fibrinogen alpha chain (FGA); Annexin A2 (ANXA2); H2A histone family, member J (H2AFJ); Actin alpha, cardiac muscle 1 (ACTC1); Keratin 19 (KRT19); Immunoglobin lambda locus (IGL@protein); Immunoglobulin heavy constant mu (IGHM); EGF-containing fibulin-like extracellular matrix protein 1 (EFEMP1); Tripartite motif-containing protein 34; Isoform 3 of AP1-subunit Gamma Binding Protein 1; Proflin-1; Histone H4; Hemoglobin subunit alpha; Transgelin); Lumican precursor; Hemoglobin Beta; Fibrinogen Beta Chain Precursor; Immunoglobulin kappa constant (IGKC); Uncharacterized Protein ALB; ApoA1; C4A; C3 187 kDa protein; Actin, Cytoplasmic 1 (actin beta); Hemoglobin beta; Hemoglobin subunit alpha; POTE-2 alpha actin; SLC4A10; Ribonuclease P Protein Subunit P20 (POP7); Nuclear RNA export factor 1 (NXF1); UVEAL Autoantigen With Coiled-Coil Domains And Ankyrin Repeats, UACA; Uncharacterized Protein C13ORF27; Isoform 3 of Sushi, Nidogen And EGF-Like Domain-Containing Protein 1 Precursor; Isoform 1 Of Dynein Heavy Chain 10, Axonemal (DNAH10); Gap junction alpha-1 protein (GJA1/Connexion 43); Isoform 1 Of Kinesin-Like Protein KIF25 (KIF25); GAPDH-Glyceraldehyde-3-Phosphate Dehydrogenase; Uncharacterized Protein ALB; Galectin-3, LGALS3; Similar to NAC-Alpha Domain-Containing Protein 1 (NACAD); Acetyl-CoA Acetyltransferase, Mitochondrial, ACAT1; KH-Type Splicing Regulatory Protein, FUBP2; Profilin 1 (PFN1); Chloride Intracellular Channel Protein 1, CLIC1; Zinc Finger Protein 831; Endoplasmin; Ribosomal Protein S10 (RPS10); Splicing Factor, Arginine/Serine-Rich 3; ACTA2 Protein (alpha actin, smooth muscle); Isoform 1 of Sodium Channel Protein Type 8 Subunit Alpha, SCN8A; Isoform Long of Galectin-9; T-Complex Protein 1 Subunit Epsilon, CCT5; Alpha-Enolase, Lung Specific; Proto-Oncogene Serine/Threonine-Protein Kinase MOS; Isoform 1 Of Beta-Adducin (ADD2); Apolipoprotein E (APOE); Ubiquilin-4 (UBQLN4) (ataxin-1 ubiquitin-like interacting protein); Sumo-Conjugating Enzyme UB21 (UBC9 homolog in yeast); Myosin-15 (MYH15); FLJ93091, Homo Sapiens UMP-CMP Kinase (UMP-CMPK); Intelectin-1 (ITLN1); Apolipoprotein A-IV (APOA4); Mitochondrial pyruvate dehydrogenase (lipoamide) alpha 1 (PDHA1); Leucine-Rich Repeat-Containing Protein 59 (LRRC59); 60S Ribosomal Protein L37A (RPL37A); Uridine-Cytidine Kinase 1-like 1 (UCKL1); Aldehyde Dehydrogenase 9A1 (ALDH9A1); Isoform 3 of Thioredoxin Reductase 1, Cytoplasmic (TXNRD1); Nuclear Receptor Subfamily 2 Group E Member 1 (NR2E1); Cation Channel Sperm-Associated Protein 3 (CATSPER3); Transmembrane EMP24 Domain-Containing Protein 1 (TMED1); Protein FAM154A (FAM154A); and Isoform 1 of Transcriptional Repressor NF-X1 (NFX1) or any combination thereof.

9. The isolated antibody of claim 8, wherein the protein or polypeptide comprises an amino acid sequence set forth as SEQ ID NO:1-157.

10. The isolated antibody of claim 8, wherein the antibody is a monoclonal antibody, a polyclonal antibody, a single-chain antibody, a monospecific single-chain antibody, a bispecific single-chain antibody, a bivalent single-chain antibody, a tetravalent single-chain antibody, a chimeric antibody, an antigen-binding fragment of an antibody, or a humanized antibody.

11. (canceled)

12. (canceled)

13. (canceled)

14. (canceled)

15. A kit for the detection of cancer in a mammal, the kit comprising (a) an antibody or antigen-binding fragment thereof, wherein in the antibody or antigen-binding fragment thereof specifically binds an epitope of a protein or polypeptide selected from the group consisting of Titin; HBA1; Insulin-like growth factor 1 receptor (IGF1R); Isoform 3 of zonadhesin precursor; latent transforming growth factor beta binding protein 4 (LTBP4); ASXL1 (additional sex combs like 1); beta globin (HBB); BMP15-bone morphogenetic protein; TRIM49; DNAJ homolog subfamily B member 11 precursor; uncharacterized hematopoietic stem/progenitor cells protein MDS027; uncharacterized protein ALB; isoform 3 of sushi, nidogen and EGF-like domain-containing protein 1 precursor; isoform 2 of peripherin; mitochondrial 28S ribosomal protein S22; translation initiation factor EIF-2B subunit epsilon; estradiol 17-beta-dehydrogenase 1; XRCC6BP1; brain-specific angiogenesis inhibitor 1 precursor; isoform 2 of ring finger and CCCH-type zinc finger domain-containing protein 2; hemoglobin subunit beta; isoform 1 of far upstream element-binding protein 1; GALECTIN-3; lysozyme C precursor; actin, alpha skeletal muscle; isoform M2 of pyruvate kinase isozymes M1/M2; AGR2; neutrophil defensin 1 precursor; myeloblastin precursor; uncharacterized protein PSME2; tubulin beta-2C chain; thiosulfate sulfurtransferase; heat shock 70 kDa protein 1; Ig kappa chain V-III region sie; macrophage migration inhibitory factor; isoform 1 of ATP synthase subunit D, mitochondrial; uncharacterized protein ENSP00000374051; isocitrate dehydrogenase [NADP] cytoplasmic; hemoglobin subunit delta; isoform 1 of splicing factor, arginine/serine-rich 7; isoform 1 of mRNA-capping enzyme; LON protease homolog, mitochondrial precursor; signal recognition particle 54 kDa protein; isoform long of galectin-9; integrin-linked protein kinase; bifunctional aminoacyl-tRNA synthetase; isoform 1 of zinc finger protein 207; inorganic pyrophosphatase; calponin-2; isoform 1 of muscleblind-like protein 3; cathepsin G precursor; zinc finger and BTB domain-containing protein 34; adenine phosphoribosyltransferase; 40S ribosomal protein S9; TALIN-1; leucine-rich repeat-containing protein 59; ATP synthase subunit alpha, mitochondrial precursor; isoform 7 of protein transport protein SEC31A; dihydroxyacetone kinase; protein similar to heterogeneous nuclear ribonucleoproteins C1/C2 (HNRNP C1/HNRNP C2) isoform 4; 18 kDa protein (e.g., UNIPARC Accession Number IP100796554; cold agglutinin FS-1 L-chain; isoform 1 of heterogeneous nuclear ribonucleoprotein d0; DAZAP1/MEF2D fusion protein; POTE2; Keratin 18 (KRT18); PSME4 Isoform 1 of Proteasome activator complex subunit; Mitogen-activated protein kinase-activated protein kinase (MAPKAPK33); Complement component 1, s subcomponent (C1S); Lysozyme C precursor (LYZ); Keritin Type Cytoskeletal 20 (KRT20); RNASE3; Aldehyde dehydrogenase X, mitochondrial precursor (ALDH1B1); CDNA FLJ25506 fis, clone CBR05185; Isoform B of fibulin-1 precursor (FBLN1); Nucleobindin 1 (NUCB1); Histone cluster 2, H2ba (HIST2H2BA); Tripartite motif-containing 28 (TRIM28); Peroxisomal D3, D2 enoyl-CoA isomerase (PECI); Peptidylprolyl isomerase B (PPIB); Similar to 40S ribosomal protein S17; Eukaryotic translation elongation factor 1 gamma (EEF1G); Keratin 8 (KRT8); Fibulin 2 (FBLN2); VIM; Fibrinogen alpha chain (FGA); Annexin A2 (ANXA2); H2A histone family, member J (H2AFJ); Actin alpha, cardiac muscle 1 (ACTC1); Keratin 19 (KRT19); Immunoglobin lambda locus (IGL@protein); Immunoglobulin heavy constant mu (IGHM); EGF-containing fibulin-like extracellular matrix protein 1 (EFEMP1); Tripartite motif-containing protein 34; Isoform 3 of AP1-subunit Gamma Binding Protein 1; Proflin-1; Histone H4; Hemoglobin subunit alpha; Transgelin); Lumican precursor; Hemoglobin Beta; Fibrinogen Beta Chain Precursor; Immunoglobulin kappa constant (IGKC); Uncharacterized Protein ALB; ApoA1; C4A; C3 187 kDa protein; Actin, Cytoplasmic 1 (actin beta); Hemoglobin beta; Hemoglobin subunit alpha; POTE-2 alpha actin; SLC4A10; Ribonuclease P Protein Subunit P20 (POP7); Nuclear RNA export factor 1 (NXF1); UVEAL Autoantigen With Coiled-Coil Domains And Ankyrin Repeats, UACA; Uncharacterized Protein C13ORF27; Isoform 3 of Sushi, Nidogen And EGF-Like Domain-Containing Protein 1 Precursor; Isoform 1 Of Dynein Heavy Chain 10, Axonemal (DNAH10); Gap junction alpha-1 protein (GJA1/Connexion 43); Isoform 1 Of Kinesin-Like Protein KIF25 (KIF25); GAPDH-Glyceraldehyde-3-Phosphate Dehydrogenase; Uncharacterized Protein ALB; Galectin-3, LGALS3; Similar to NAC-Alpha Domain-Containing Protein 1 (NACAD); Acetyl-CoA Acetyltransferase, Mitochondrial, ACAT1; KH-Type Splicing Regulatory Protein, FUBP2; Profilin 1 (PFN1); Chloride Intracellular Channel Protein 1, CLIC1; Zinc Finger Protein 831; Endoplasmin; Ribosomal Protein S10 (RPS10); Splicing Factor, Arginine/Serine-Rich 3; ACTA2 Protein (alpha actin, smooth muscle); Isoform 1 of Sodium Channel Protein Type 8 Subunit Alpha, SCN8A; Isoform Long of Galectin-9; T-Complex Protein 1 Subunit Epsilon, CCT5; Alpha-Enolase, Lung Specific; Proto-Oncogene Serine/Threonine-Protein Kinase MOS; Isoform 1 Of Beta-Adducin (ADD2); Apolipoprotein E (APOE); Ubiquilin-4 (UBQLN4) (ataxin-1 ubiquitin-like interacting protein); Sumo-Conjugating Enzyme UB21 (UBC9 homolog in yeast); Myosin-15 (MYH15); FLJ93091, Homo Sapiens UMP-CMP Kinase (UMP-CMPK); Intelectin-1 (ITLN1); Apolipoprotein A-IV (APOA4); Mitochondrial pyruvate dehydrogenase (lipoamide) alpha 1 (PDHA1); Leucine-Rich Repeat-Containing Protein 59 (LRRC59); 60S Ribosomal Protein L37A (RPL37A); Uridine-Cytidine Kinase 1-like 1 (UCKL1); Aldehyde Dehydrogenase 9A1 (ALDH9A1); Isoform 3 of Thioredoxin Reductase 1, Cytoplasmic (TXNRD1); Nuclear Receptor Subfamily 2 Group E Member 1 (NR2E1); Cation Channel Sperm-Associated Protein 3 (CATSPER3); Transmembrane EMP24 Domain-Containing Protein 1 (TMED1); Protein FAM154A (FAM154A); and Isoform 1 of Transcriptional Repressor NF-X1 (NFX1) or any combinations thereof; and (b) one or more reagents for detecting a binding reaction between the antibody and the polypeptide.

16. The kit of claim 15, wherein the protein or polypeptide comprises an amino acid sequence set forth as SEQ ID NO:1-157.

17.-50. (canceled)

51. The isolated antibody or antigen-binding fragment thereof of claim 8, wherein the isolated antibody or antigen-binding fragment thereof specifically binds to the protein or polypeptide with a binding affinity Kₐ of 10⁷ l/mol or more.

52. The isolated antibody or antigen-binding fragment thereof of claim 8, wherein the isolated antibody or antigen-binding fragment thereof is bound to a support.

53. The isolated antibody or antigen-binding fragment thereof of claim 8, wherein the isolated antibody or antigen-binding fragment is labeled.

54. The method of claim 1, wherein the biological sample is obtained from the subject before, during, or after treatment for cancer.

55. The method of claim 7, wherein the antibody or antigen-binding fragment thereof is labeled.

56. The method of claim 7, wherein the antibody or antigen-binding fragment thereof is bound to a support.

57. The method of claim 7, wherein the antibody or antigen-binding fragment thereof specifically binds to the polypeptide with a binding affinity Kₐ of 10⁷ l/mol or more.

58. The method of claim 1, wherein the expression level of the cancer-associated protein or polypeptide is detected using mass spectrometry, an ELISA, an immunohistochemical assay, an immunocytochemical assay, or a flow cytometry assay of antibody-labeled cells.
